United States Patent Application Publication US 2019/0002960 A1 - sequence listing, part 7

SEQ ID NO: 7 - DNA, 2832478 bp, Staphylococcus aureus subsp. aureus ED133 (residues 1-1,416,239 of 2,832,478)
cgattaaagatagaaatacacgatgcaagcaatcaaatttcataacatcaccataagtttggtccgaagcatgagtgtttacaatgtttgaataccttatacagttcttatacatactttataaattatttcccaagctattttgatacacacactaacagatactctatagaaggaaaagttatccacttatgcacatttatagtttttagaattgtggataattagaaattacacacaaagttatactatttttagcaacatattcacaggtatttgacatatagagaactgaaaaagtataattgtgtggataagtcgtccaactcatgattttataaggatttatttattgatatttacataaaaatactgtgcataactaataagcaggataaagttatccactgattgttattaacttgtggataattattaacatggtgtgtttagaagttatccacggctgttatttttgtgtataacttaaaaatttaagaaagatggagtaaatttatgtcggaaaaagaaatttgggaaaaagtgcttgaaattgctcaagaaaaattatcagctgtaagttactcaactttcctaaaagatactgagctttacacgatcaaagatggtgaagctatcgtattatcgagtattccttttaatgcaaattggttaaatcaacaatatgctgaaattatccaagcaatcttatttgatgttgtaggctatgaagtaaaacctcactttattactactgaagaattagcaaattatagtaataatgaaactgctactccaaaagaaacaacaaaaccttctactgaaacaactgaggataatcatgtgcttggtagagagcaattcaatgcccataacacatttgacacttttgtaatcggacctggtaaccgctttccacatgcagcgagtttagctgtggccgaagcaccagccaaagcgtacaatccattatttatctatggaggtgttggtttaggaaaaacccatttaatgcatgccattggtcatcatgttttagataataatccagatgccaaagtgatttacacatcaagtgaaaaattcacaaatgaatttattaaatcaattcgtgataacgaaggtgaagctttcagagaaagatatcgtaatatcgacgtcttattaatcgatgatattcagttcatacaaaataaagtacaaacacaagaagaatttttctatacttttaatgaattgcatcagaataacaagcaaatagttatttcgagtgatcgaccaccaaaggaaattgcacaattagaagatcgattacgttcgcgctttgaatgggggctaattgttgatattacgccaccagattatgaaactcgaatggcaattttgcagaagaaaattgaagaagaaaaattagatattccaccagaagctttaaattatatagcaaatcaaattcaatctaatattcgtgaattagaaggtgcattaacgcgtttacttgcatattcacaattattaggaaaaccaattacaactgaattaactgctgaagctttaaaagatatcattcaagcaccaaaatctaaaaagattaccatccaagatattcaaaaaattgtaggccagtattataatgttagaattgaagatttcagtgcaaaaaaacgtacaaagtcaattgcatatccgcgtcaaatagctatgtacttgtctagagagcttacagatttctcattacctaaaattggtgaagaatttggtgggcgtgatcatacgaccgtcattcatgctcatgaaaaaatatctaaagatttaaaagaagatcctatttttaaacaagaagtagagaatcttgaaaaagaaataagaaatgtataagtaggaaacttttgggaaatgtaatctgttatataacagcactaataataacaatcattttttacatttctatatgctaatgtggcaagatgagcaaaaactcattttgtggataatgtttaaaagtcatacacaccatacacaagttatcaacatgtgtataacttcgccaaatctatgtttttaagacttatccaccaatccacagcacctactactattactaagaacttaaaacctatataattatatataaacgactggaaggagttttaattaatgatggaattcactattaaaagagattattttattacacaattaaatgacacattaaaagctatttcaccaagaacaacattacctatattaactggtatcaaaatcgatgcaaaagaacatgaagttatattaactggttcagactctgaaatttcaatagaaatcactattcctaaaactgtagatggcgaagatattgtcaatatttcagaaacaggctcagtagtacttcctggacgattctttgttgatattataaaaaaattacctggtaaagatgttaaattatctacaaatgaacaattccagacattaattacatcaggtcattctgaatttaatttaagtggcttagatccagatcaatatcctttattacctcaagtttctagagatgacgcaattcaattgtcggtaaaagtgcttaaaaacgtaattgcacaaacgaattttgcagtgtccacctcagaaacacgcccagtactaactggtgtgaactggcttatacaagaaaatgaattaatatgcacagcaactgactcacaccgcttggctgtaagaaagttgcagttagaagatgtttctgaaaacaaaaatgtcatcattccaggtaaggctttagctgaattaaataaaattatgtctgacaatgaagaagacattgatatcttctttgcttcaaaccaagttttatttaaagttggaaatgtgaactttatttctcgattattagaaggacattatcctgatacaacacgtttattccctgaaaactatgaaattaaattaagtatagacaatggggagttttatcatgcgattgatcgtgcatctttattagcacgtgaaggtggtaataacgttattaaattaagtacaggtgatgacgttattgaattgtcttctacatcaccagaaattggtactgtaaaagaagaagttgatgcaaacgatgttgaaggtggtagcctgaaaatttcattcaactctaaatatatgatggatgctttaaaagcaatcgataatgatgaggttgaagttgaattcttcggtacaatgaaaccatttattctaaaaccaaaaggtgacgactcggtaacgcaattaattttaccaatcagaacttactaaaaataaatataaataaaggatgacgtgattaattaaaacgtcatcctttattttttggcaaaaatagttctagattcgtatgtaaaataaatttgacagcattttaaacagcaaataaaagacgccaattaaatttatgacaaatgtatccaaaatttaataagtgtgcttatatgccctttaaatttaaatttttaatagtcaataacaagttgaatataaaagttaaacgccgttaaatagcgttaaaaaattgaaaatgacagtattgccaaaaaataagaattaattatttatatgtaaacggtttctacctctattttaaatgaaatttgtgacaaaaaaaggtataatatattaatgacatacaaagaaatggagtgattattttggttcaagaagttgtagtagaaggagacattaatttaggtcaatttctaaagacagaagggattattgaatctggtggtcaagcaaaatggttcttgcaagacgttgaagtattaattaatggagtgcgtgaaacacgtcgcggtaaaaagttagaacatcaagatcgtatagatatcccagaattacctgaagatgctggttctttcttaatcattcatcaaggtgaacaatgaagttaaatacactccaattagaaaattatcgtaactatgatgaggttacgttgaaatgtcatcctgacgtgaatatcctcattggagaaaatgcacaaggaaagacaaatttacttgaatcaatctataccttagctttagcaaaaagtcatagaacgagtaatgataaggaactcatacgttttaatgctgattatgctaaaatagaaggtgagcttagttatagacacggcacgatgccattaacaatgtttataactaaaaaaggtaaacaagtcaaagtgaatcacttagagcaaagtcgtctaactcaatatattggacacctcaatgtggttctatttgcgccagaagatttgaatattgtaaaaggctctcctcaaataagacgacgctttatagatatggagttgggccaaatttctgctgtttacttaaatgatttagctcaataccaacgtattttaaagcaaaagaataattacttaaagcagttacaattaggccaaaaaaaggacttaacaatgttggaagtattaaatcagcagtttgctgaatatgcaatgaaagtaactgataaacgtgcacattttattcaagagctagagtcgttagctaaaccgattcatgctggtatcacaaatgataaagaagcgttgtcgctgaattatttacctagtcttaaatttgactatgctcaaaatgaagcggcacgacttgaagaaattatgtctattcttagcgataatatgcaaagagaaaaagaacgaggcattagcttattcggaccacatcgagatgatataagttttgatgtgaatggcatggatgctcaaacatatggttctcaaggacagcaacgtacaacggctttgtccattaaattagctgaaattgagttaatgaatatcgaagttggggaatatcccatcttattattagacgatgtactcagtgaattagatgattcgcgtcaaacgcatttattaagtacgattcagcataaagtacaaacatttgtcactacgacatctgtagatggtattgatcatgaaatcatgaataacgctaaattgtatcgtattaatcaaggtgaaattataaagtaacagaaagcgatggtgactgcattgtcagatgtaaacaacacggataattatggtgctgggcaaatacaagtattagaaggtttagaagcagtacgtaaaagaccaggtatgtatataggatcgacttcagagagaggtttgcaccatttagtgtgggaaattgtcgataatagtatcgatgaagcattagctggttatgcaaatcaaattgaagttgttattgaaaaagataactggattaaagtaacggataacggacgtggtatcccagttgatattcaagaaaaaatgggacgtccagctgtcgaagttattttaactgttttacatgctggtggtaaatttggcggtggcggatacaaagtatctggtggtttacatggtgttggttcatcagttgtaaacgcattgtcacaagacttagaagtatatgtacacagaaatgagactatatatcatcaagcatataaaaaaggtgtacctcaatttgacttaaaagaagttggcacaactgataagacaggtactgtcattcgttttaaagcagatggagaaatcttcacagagacaactgtatacaactatgaaacattacagcaacgtattagagagcttgctttcttaaacaaaggaattcaaatcacattaagagatgaacgtgatgaagaaaacgttagagaagactcctatcactatgagggcggtattaaatcttatgttgagttattgaacgaaaataaagaacctattcatgatgagccaatttatattcatcaatctaaagatgatattgaagtagaaattgcgattcaatataactcaggatatgccacaaatcttttaacttacgcaaataacattcatacgtacgaaggtggtacgcatgaagacggattcaaacgtgcattaacgcgtgtcttaaatagttatggtttaagtagcaagattatgaaagaagaaaaagatagactttctggggaagatacacgtgaaggtatgacagcaattatatctatcaaacatggtgatcctcaattcgaaggtcaaacgaagacaaaattaggtaattctgaagtgcgtcaagttgtagataaattattctcagagcactttgaacgatttttatatgaaaatccacaagtcgcacgtacagtggttgaaaaaggtattatggcggcacgtgcacgtgttgctgcgaaaaaagcgcgtgaagttacacgtcgtaaatcagcgttagatgtagcaagtcttccaggtaaattagccgattgctctagtaaaagtcctgaagaatgtgagattttcttagtcgaaggggactctgccggggggtctacaaaatctggtcgtgactctagaacgcaggcgattttaccattacgaggtaagatattaaatgttgaaaaagcacgattagatagaattttgaataacaatgaaattcgtcaaatgatcacagcatttggtacaggaattggtggcgactttgatctagcgaaagcaagatatcacaaaatcgtcattatgactgatgccgatgtggatggagcgcatattagaacattgttattaacattcttctatcgatttatgagaccgttaattgaagcaggctatgtgtatattgcacagccaccgttgtataaactgacacaaggtaaacaaaagtattatgtatacaatgatagggaacttgataaacttaaatctgaattgaatccaacaccaaaatggtctattgcacgatacaaaggtcttggagaaatgaatgcagatcaattatgggaaacaacaatgaaccctgagcaccgtgctcttttacaagtaaaacttgaagatgcgattgaagcggaccaaacatttgaaatgttaatgggtgacgttgtagaaaaccgtagacaatttatagaagataatgcagtttatgcaaacttagacttctaagcgctgtgaactgaacttttgaaggaggaactcttgatggctgaattacctcaatcaagaataaatgaacgaaatattaccagtgaaatgcgtgaatcatttttagattatgcgatgagtgttatcgttgctcgtgcattgccagatgttcgtgacggtttaaaaccagtacatcgtcgtatactatatggattaaatgaacaaggtatgacaccggataaatcatataaaaaatcagcacgtatcgttggtgacgtaatgggtaaatatcaccctcatggtgactcatctatttatgaagcaatggtacgtatggctcaagatttcagttatcgttatccgcttgttgatggccaaggtaactttggttcaatggatggagatggcgcagcagcaatgcgttatactgaagcgcgtatgactaaaatcacacttgaactgttacgtgatattaataaagatacaatagattttatcgataactatgatggtaatgaaagagagccgtcagtcttacctgctcgattccctaacttattagccaatggtgcatcaggtatcgcggtaggtatggcaacgaatattccaccacataacttaacagaattaatcaatggtgtacttagcttaagtaagaaccctgatatttcaattgctgagttaatggaagatattgaaggtcctgatttcccaactgctggacttattttaggtaagagtggtattagacgtgcatatgaaacaggtcgtggttcaattcaaatgcgttctcgtgcagttattgaagaacgtggaggcggacgtcaacgtattgttgtcactgaaattcctttccaagtgaataaggctcgtatgattgaaaaaattgcagagctcgttcgtgacaagaaaattgacggtatcactgatttacgtgatgaaacaagtttacgtactggtgtgcgtgtcgttattgatgtgcgtaaggatgcaaatgctagtgtcattttaaataacttatacaaacaaacacctcttcaaacatcatttggtgtgaatatgattgcacttgtaaatggtagaccgaagcttattaatttaaaagaagctttggtacattatttagagcatcaaaagacagttgttagaagacgtacgcaatataacttacgtaaagctaaagatcgtgcccacattttagaaggattacgtatcgcacttgaccatatcgatgaaattatttcaacgattcgtgagtcagatacagataaagttgcaatggaaagcttgcaacaacgcttcaaactttctgaaaaacaagctcaagctattttagacatgcgtttaagacgtctaacaggtttagagagagacaaaattgaagctgaatataatgagttattaaattatattagtgaattagaagccatcttagctgatgaagaagtgttattacagttagttagagatgaattgactgaaattagagatcgtttcggtgatgagcgtcgtacagaaattcaattaggtggatttgaagacttagaggacgaagacttaattccagaagaacaaatagtaattactttgagccataataactacattaaacgtttgccggtatctacatatcgtgctcaaaaccgtggtggtcgtggtgttcaaggtatgaatacattggaagaagattttgtcagtcaattggtaactttaagtacacatgaccatgtattgttctttactaacaaaggtcgtgtatacaaactaaaaggttatgaagtgcctgagttatcaagacagtctaaaggtattcctgtagtgaatgctattgaacttggaaatgatgaagtcattagtacaatgattgctgttaaagaccttgaaagtgaagacaacttcttagtgtttgcaactaaacgtggtgttgttaaacgttcagcattaagtaacttctcaagaataaatagaaatggtaagattgcgatttcgttcagagaagatgatgagttaattgcagttcgtttaacaagtggtcaagaagatatcttgattggtacatcacatgcatcattaattcgattccctgaatcaacattacgtcctttaggccgtacagcaacgggtgtgaaaggtattacacttcgtgaaggtgacgaagttgtagggcttgatgtagctcatgcaaacagtgttgatgaagtattagtagttactgaaaatggttatggtaaacgtacgccagttaatgactatcgtttatcaaatcgtggtggtaaaggtattaaaacagctacgattactgagcgtaatggtaatgttgtatgtatcactacagtaactggtgaagaagatttaatgattgttactaatgccggtgtcattattcgactagatgttgcagatatttctcaaaatggtcgtgcagcacaaggtgttcgcttaattcgcttaggagatgatcaatttgtttcaacggttgctaaagtaaaagaggatgcagatgaagtaaatgaagatgaacaatctactgtatctgaagatggtactgaacaacaacgtgaagcggttgtaaatgatgaaacaccaggaaatgcaattcatactgaagtgattgattcagaagaaaatgatgaagatggacgtattgaagtaagacaagatttcatggatcgtgttgaagaagatatacaacaatcatcagatgaagatgaagaataataaaaaaataagacttccctatatgtaggggagtcttatttttatgctagaaagtaatgctgtactatattcaatgattagtaatgattaactttctaattgtttcattgcgtaaggtatttcattgataagtcttgatggtggcaccacatacatatcttttgcaagattttcgccaataaaactatgtgtatatgtggcactcataaccgcttcttttaagttatcaaattgaccaacaaaacttgtaatcataccagcaagtgtatcgcccataccaccagtcgccattgctgggctaccgattgttaatttaaagtcttcatctttaaagaaaatttcagtaccatgttttttaagtacaacagttgcgcctaaacgatcaactgcttcacgattacgctcatatgtctgttcctcaataggaataccacttaatcgctcccattctttgagatgcggagtaaaaatcacgcgacatgtaggtaattgcggtttcagtttactaaatattgtaatcgcatcgccgtctacgattaaattttgatgcggttgtatattttgtagtaggaatgtaatggcattatttcctttgaaatcaacgccaagacctggaccaattagtatactgtcagtcatttcaatcattttcgtcaacattttcgtatcattaatatcaataaccatcgcttctgggcaacgagaatgtaatgctgaatgatttgttggatgtgtagctacagtgattaaaccactaccgctaaatacacatgcacgagccgctaacataatggcaccacctaagttagcagatccaccaattaataaaattttgccataatcacctttatgtgaatcttctttacgcttaggaatgttaatagaatttaacgtttccatagtgatataacctcccatgtaaaagccttttccgaatttattcaattttaaaaatatatagtaacttttaacaaaatgtattataaatttctgaattcattattatttgtcgttaaatacaatagaaaatactatacctgtatatgcaattcgtcaatagataaattattaaatatgcttacaacaatcttaatatcctttaacgcactacaatagtgctctgataataggttataaatgtacgtaaaaccattgtttcaataaaaatgaaaacgtatacttcaagaaggatgggttacttaatataaacaagggggtaacatatatgactttatatttagatggtgaaacactaacaattgaggatattaaatcatttttacaacaacaatcaaagattgaaattattgatgatgcgttagaacgtgtcaaaaaaagtagagcggtagttgaacgtattattgaaaatgaggaaacggtttacggtatcactacaggttttgggttatttagtgatgtacgtatagacccgacgcaatataatgaattacaagtgaatctgatacgctcacatgcctgtggactaggtgagccattttcaaaagaagtagcattagtcatgatgattttacgattgaatacattattaaaaggtcattcaggtgccactttagaattagtgagacaattacaattttttataaatgaacgtattataccgataatcccacaacaaggctctctcggtgcatcaggagatttagcaccattatcacacttagcattagcattaattggtgaagggaaagtattgcacagaggggaagaaaaggatagtgacgatgtattaagagaattaaatagacaacctttgaaccttcaggctaaagaaggtttagcattgattaatggtacccaagctatgacagctcaaggtgtcattagttatatagaagcagaagatttaggttaccaatctgaatggattgctgcattaacgcatcagtctcttaatggcattatagatgcatatcgacatgatgtgcacgctgttcgtaattttcaagaacagattaatgtggcagcgcgtatgcgtgattggttagaaggatcaacattaacgacgcgacaagcagaaatacgtgtacaagatgcatatacgttgcgttgtataccacaaatccatggcgcgagttttcaagtattcaattatgttaaacagcaattagaatttgaaatgaatgcggctaatgataatccacttatatttgagggagcaaatgaaacgtttgttatttcaggtggtaacttccatggacaaccaattgcttttgcattagatcatcttaaattaggtgtaagtgaattagcaaacgtatcggaacgtcgtctagagcgactagtaaatcctcaattaaatggtgatttaccagcatttcttagcccagagccaggattgcaaagtggcgcgatgattatgcaatatgctgctgcaagtctcgtttctgaaaataaaactttagcgcatccagcgagtgttgattctatcacttcatctgcgaaccaagaagatcacgtatctatgggaactacagctgctagacatggttatcaaattattgaaaatgcaagacgtgtgttggcaatcgaatgtgttattgcattacaagcagcagagttgaaaggtgtcgaaggattatcaccaaaaacacgtcgcaagtatgatgagtttcgaagtatcgtgccatccattacacatgaccgtcaatttcataaagatattgaagcggttgcacagtatttaaagcaatcaatttatcaaacgactgcatgtcactaaatcgacatgagtgatgtttgaaatcgttacttgaaaaagcaaatatagtttgctatattaaaaataacttaataagacattgttcgtaggacaagtaatatatagtgttcgatatcagagagcttgtggttagtgtgaacaagaatcaacatatatatgaatctacctacttaatttaaaagaacaatcggtgataaccgttattttagtgaagtgcaatttaggtttagtgtatctttataacttaaattgttaaatagggtggcaacgcgtagaccacgtcccttgtagggatgtggtctttttttattttctaaaaaataaagacgtacgtcattccataataaatgataattatttgggaaaggatgaaggttaatgttagacattagattattcagaaatgagcctgacacagttaagagcaaaattgaattacgcggagatgatccaaaagttgtagatgaaattttagaattggatgagcaacgacgtaaattaattagtgcaacagaagaaatgaaagcacgtcgtaataaagtaagtgaagaaatcgcattaaaaaaacgtaataaagaaaatgctgatgatgtgattgctgaaatgcgcacattaggtgacgatattaaagaaaaagatagtcaattaaatgaaattgataataaaatgacaggtatcctttgtcgtattccaaatttaataagtgatgatgtacctcaaggtgaatctgatgaagataacgttgaagttaaaaagtggggtacaccacgtgagttttcatttgaaccaaaagcacattgggatattgtagaagaattgaaaatggctgattttgatcgtgcagcaaaagtttcaggtgcgcgttttgtatatttaacaaatgaaggtgcgcaattagagcgtgctttaatgaactatatgattacaaaacatacaacacaacatggttatacagaaatgatggtaccacagcttgtgaacgcagatacaatgtatggtacaggtcaattacctaaatttgaagaagatttatttaaagtagaaaaagaaggattatatacaattccaactgctgaagtaccattaacgaatttctatcgtaatgaaattattcaaccaggtgtacttcctgaaaaattcactggtcaatctgcatgtttccgaagtgaagcaggatcagcaggtagagatacaagaggattaattcgtttacatcaattcgataaagtggaaatggtatgttttgaacaaccagaagattcatggaatgctttagaagaaatgacaacaaacgcagaagcaattctagaagagttaggtttaccataccgtcgtgttattttatgtacaggtgatattggatttagtgcaagcaaaacatatgatttagaagtttggttaccaagctacaatgattataaagaaattagttcatgctcaaactgtacggatttccaagcgcgtcgtgctaacatccgcttcaagcgtgacaaagcagctaaaccagaattagcacatacattaaatggtagtggtttagcagttggacgtacatttgctgctattgttgaaaattaccaaaatgaagatggaacagtaacaattccagaagcattagtaccatttatgggtggtaaaactcaaatttcaaaaccagttaaataaaggctttagctacaaactttaaaaaagtatatatctacgtatacttaaagcaagggcaagatactttaaataatattttaaaaagtggtgacgaagctgtcgccactttttttgtgctgtaaaagtataatagtgagccaatgcacataacaacaataaattaagtttgtggtttaatggggtgaacgcatttcattatagcaacaatacgggataattatgatgaactaaaacaatctaaaacgtaacaaaattgagcaaaactattataggaaattaagcgataaaaaactgatttcgttgatgtagtatgagtaatatcgatgcagtaggatagggggtgaggggatgatgattataagtgtttgagacacgaatcaatatcccagactcatcattagatataaaaaattataaaattagtacttaaaaacaactacaaatccgtagaaaatatggaggtagtcttaaataaaatattgaaaattctcaaaactaaaaagttaagacggaagtatttcaagacatcggtatgtctaacctcagacaaaccgacgtctaatgttattgcttagggtatagaactgtattagactaggtatattattttttcgtaattatataaataaaaagtgacaaaggaggtaattgagatgacaacgcatttaagttttagacaaggcgtgcaagagtgtatcccaacattattgggttatgccggtgttggtatttcatttggtattgtggcttcgtctcaaaactttagtattttagaaattatcttgttatgtcttgttatatatgccggtgctgcgcaatttattatgtgcgcattgtttatagcaggtacaccgatatcagcgattgtactaactgtatttatcgtaaattcaagaatgttccttttaagtatgtcgcttgcaccaaacttcaagacatatgggttttggaaccgtgttggattaggttcattagtaactgacgaaacgtttggcgttgccattacaccttatttaaaaggagaagctatcaatgatcgctggatgcatgggcttaatatcacagcatatttattttgggcaatttcgtgtgtagctggggctttatttggcgaatatatctcaaatccgcaaacgttagggttagactttgctatcacagctatgtttatctttttggccattgcgcaatttgaatcaattactaaatcgcgattaagaatttacatagtactcattattgccgtcatagtaatgatgttatcgctaagtatgtttatgccttcatatctagcaatattaattgcagccacaatttcagcagcgttaggagtgatgatggaacgatgataactcatatgaacatgttaatacttattttattgtgtggtatcgtaacgctattaattcgaattataccttttatcatgatttcaaaagtgcaattgcctgatgtcgtggttagatggctatcatttattccaatcacactatttacggcacttgtcattgacagcattattcagcagacgcctcatggtgaggggtatacattaaacatcccttacattatcgcgctcattccgacggttattttatctataatcacgcgtagtttaactattacaattattagtgggattgttatcatggcagcattacgatttttcttttaaaaataactgaaaatcattgaacagatatttaaacttaggtaaactgttagtaatcagaaaattctgatatgcaaatcgtctatgttaagattgggaatcgtgtatacgtaagcgatttggctaacgcatgactatgataacaacattttaaatgataaaagtaattcatcactgaatctcaactaacacataacaatttcatatttcttattgtgagaagttgagggacttggccctgtgatacttcagcaaccgactttatagcacggtgctaaaaccaacgagttactcgaatgataagtataaagacttcttacttttcaatagggtgagaagtttttttgtttaaggaggaaagaacaatgacaaattacacagtagatactttaaatctagggaaatttattacagaatctggggaagtcatagataacttgcgtttgagatatgagcatgtcggttatcatggacaaccattagttgtagtttgtcatgcattaactggcaatcatttaacatatggaacagatgattatccggggtggtggcgagaaattattgatgggggatatattcccattcacgattatcaatttttaacatttgatgttattggtagtcctttcggttcaagctcacctttaaacgaccctcattttcctaaaaaattaacattaagagatattgtcagagcgaatgaacgaggtatacaagcccttggttatgacaaaattaatattttaatagggggaagtcttggaggtatgcaagcaatggaactactttacaatcaacagtttgaagtagataaagccattattcttgctgcaacaagccgaacatcatcttatagtagagctttcaatgaaattgcaaggcaagccattcatcttggtggtaaggaaggtctaagtattgcacgccaattaggttttttgacatatcgatcatcaaaaagttatgatgaacgtttcacgccggatgaagtagtcgcataccaacaacatcaaggtaataaatttaaagaacattttgatttgaattgttatctgacactgctagatgtattggatagtcacaacattgaccgcggtcgcacagacgtaacgcatgtttttaaaaatttagaaacaaaagtgttaacgatgggattcatagatgatttgctatatccggacgatcaagttcgtgctttaggtgaacgttttaaatatcatcgtcatttctttgtacctgataacgttggtcatgacggatttttattaaactttagtacctgggcacctaacttatatcattttttgaatttaaagcattttaagcgcaagtaataatatatattttcaaagaatgaagccactaaatcatagttatcatattcaaaaacatctagagtacatgagagtggaaatgaattgtaaatctaaataaagtttgattgctatgtagtgggattaaataatcatgttgaaaatgaaagcacacaaaagcgatttaaatgagtatgttaattacttataaaacatgaaagttattattcaattaaatgaaatagaagcatacaatctataaattgttaatttccattaaagaggttaaaataatagctatagttaaaaatatgggagtggcttatgtgttttcaaaaatacaacctaaagcaacaatgattgcaacgattacgttggtatttgtcgctttagctttatatctagtgcctggtttaggactaatatttgcattatttgcaaccataccaggtatcgttttatggaataaatcaatacaatctttcgggattagtgcacttattacagtaattataacaactgttttaggtaatactttcgttttaagtgctatcatattagtcttaattgcaagtttaattattggtcaattgcttaaagaaaaaacgtctaaagaaagaatattgtacgtaacaacagtagcgatgagcttaatttcattaatcgcttttatgttactacaaacattcggaagaattccaccatcagcgagcatagtaaaacctttcaagcaaacattacatgaagcgattacgatgagcggtgccgatgcgaatatgacccaaatattagaagaagggtttagacaagcgaccgttcaattaccaggtttcatcattatcattacatttttaatcgtcttaattaacttaatcgttacatttccgattttacgaaaatttaaaatcgctacacctgtatttaagccacttttcgcgtggcaaatgagcggtattttattatggatatacattattgttatcatatgtttattatttacaggtcaaccgagtgtgttccagagcattcttttaaacttccaacttgtgttatcattagtgatgtatattcaaggtttaagtgttattcatttctttggtaaagcgaaaggtttgccgaatgcagtaacgattttactattgattatcggtacaatactgacacctacgacacatattgtaggactacttggtgttatcgatttaagtttgaatttgaagcgaatcatgaaaaataattctaaaaagtgaatagaggtggaataatgaatcggcagtccactaagaaagctttactaataccatttgtcatcatgatcatcacagcaattgttttaatgggtgtatggtttatctttaatagtcttatagcattaattgcatctatcgttcttgtcgtgatgattattgttagcatcgttttattcagacaagctttaatgaaaatggatagttatgtagatggtttgagtgctcaaatttcgacaacaaataataaagcaatcaaacatttaccaattggtatcattgttttagatgaaaatgatcacatcgaatgggttaaccaatttatgacagatcatatggaagcaaacgtcatttctgaatctgtaaatgaagtatttccaaacattttaaagcaattagatagagtgaaatccgttgaaatagaatataatcagtatcatttccaagtacgttattctgagaatgatcactgcctctatttctttgatataactgaacaagtacaaacaaatgaactatatgaaaattctaaaccaatcattgcgacattatttttagataactacgatgagattactcaaaatatgaatgatacgcagcgttcggaaatcaattcaatggtaacgcgtgtcattagtcgatgggcgactgagtataatatattctttaaaaggtatagttccgatcaattcgtagcctatttaaatcaaaaaatattagctgacttagaagaatctaaatttgatatcttgagtcaattacgtgaaaaaagtgttggttatcgtgcccaattaacattgagtattggtgttggtgaaggtactgaaaatttaatcgacttaggtgaattatcacaatcaggcctagacttagcattaggacgcggtggcgaccaagttgcaattaaaagtattaatggtaatgtgcgtttctatggcggtaagactgacccgatggagaaacgtactcgtgtaagagcacgtgtgatctcacatgcgttaaaagatattcttgcagagggtgacaaagtcattatcatgggacataaacgtcctgacttagatgcaattggtgcagcaatcggtgtgtctagatttgcaatgatgaataatttagaagcatacatcgtattaaatgaaactgacattgatccaacattacgacgcgtgatgaacgaaattgataaaaagccagagttaagagagcgatttattacatcagatgatgcttgggatatgatgacatctaagacaaccgtagtgattgttgatacgcataaaccggaactggttttagatgaaaatgtcttaaataaagcaaatcgtaaagttgttatcgatcatcatagacgtggtgaaagcttcatctctaacccattgttggtatatatggaaccatatgcaagttcgacagctgaattggtaacagagttactggaatatcaaccaacagaacaacgtttaacacgtcttgaatcaacagtgatgtatgcaggtattattgtagatacaagaaactttacattacgaacaggatcaagaacattcgatgcagcgagttatctacgtgcacatggtgcagatacgattttaacgcaacatttcttaaaagatgatgtggatacttacattaatcgatctgaattaattcgaactgtaaaagtcgaagataatggcatagccattgcgcatggttcagaagataaaatttatcatccagtaacagttgcacaagcagcagatgaactgttaagtttagaaggtattgaagcatcatatgttgttgcgagacgtgaagataatctgattggtatatctgcgcgttcactcggttcagtaaatgtccagttaacaatggaagcacttggtggcggtggacatttaaccaatgctgcaacacaacttaaaggtgtgacagtcgaagaggcgatagcacaattacaacaagcaattacagaacaattaagtaggagtgaagatgcatgaaagtaatttttacacaagatgttaaaggtaaaggtaaaaaaggtgaagttaaagaagtaccagtaggttatgcaaataacttcttattgaaaaagaattatgctgtagaagcaacaccaggtaaccttaaacaattagagttacagaaaaaacgtgcaaaacaagaacgccaacaagaaattgaagatgctaaagcattaaaagaaactttatcaaacattgaagttgaagtatcagcaaaaactggtgaaggtggtaaattgtttggatcagtaagtacaaaacaaattgctgaagcactaaaagcacaacatgatattaaaattgataaacgtaaaatggatttaccaaatggaattcattccctaggatatacgaatgtacctgttaaattagataaagaagttgaaggtacaattcgcgtacacacagttgaacaataaagttggattgaaataagaggtgtaaccattcatggatagaatgtatgagcaaaatcaaatgccacataacaatgaagctgaacagtctgtcttaggttcaattattatagatccagaattgattaatactactcaggaagtgttgcttcctgagtcattttataggggtgcccatcaacatattttccgtgcaatgatgcacttaaatgaagataataaagaaattgatgttgtaacattgatggatcaattatcgacggaaggtacgttgaatgaagcgggtggcccgcaatatcttgcagagttatctacaaatgtaccaacgacgcgaaatgttcagtattatactgatatcgtttctaagcatgcattaaaacgtagattgattcaaactgcagatagtattgccaatgatggatataatgatgaacttgaactagatgcgattttaagcgatgcagaacgtcgaattttagagctatcatcttctcgtgaaagcgatggctttaaagacattcgagacgtcttaggacaagtatatgaaacagctgaagagcttgatcaaaatagtggtcaaacaccaggtattcctacaggatatcgagatttagaccaaatgacagcagggttcaaccgaaatgatttaattatccttgcagcgcgtccatctgtaggtaagactgcgttcgcacttaatattgcacaaaaagttgcaacgcatgaagatatgtatacagttggtattttctcactagagatgggtgctgatcagttagccacacgtatgatttgtagttctggtaatgttgactcaaaccgcttaagaacgggtactatgactgaggaagattggagtcgttttactatagcggtaggtaaattatcacgtacgaagatttttattgatgatacaccgggtattcgaattaatgatctacgttctaaatgtcgtcgattaaagcaagaacatggcttagacatgattgtgattgactacttacagttgattcaaggtagtggttcacgtgcgtccgataacagacaacaggaagtttctgaaatctctcgtacattaaaagcattagcccgtgaattagaatgtccagttatcgcattaagtcagttatctcgtggtgttgaacaacgacaagataaacgtccaatgatgagtgatattcgtgaatctggttcgattgagcaagatgccgatatcgttgcattcttataccgtgatgattactataaccgtggcggcgatgaagatgaagacgatgatggtggttttgagccacaaacgaatgatgaaaacggtgaaattgaaatcatcattgctaagcaacgtaatggtccaacaggcacagttaagttacactttatgaaacaatataataaatttaccgatatcgattatgcacatgcagatatgatgtaaaaaaagtttttccgtacaataatcattccaatgataaaattgtacggtttttatttcattctgaacgggttgatatatgttaagtttgtgtattttaagtgatgaattagtgctggaaacacctctgttaaagtatttttaggacgttgaagactatttattaaaatgatttttcttttaaaaaggccgaaaagcaatgttcgatttttatttgcattatggtctcgatattggtagaatatcaaatggttaaatgagaaaaacttggaggtgctcacatgtcatcaatcgtagtagttgggacacaatggggagacgaaggaaaaggaaaaataacggatttcttggcagaacagtcagatgttatcgcgcgtttttcaggtggtaataatgcaggccataccattcaatttggcggagaaacatataaattacatttagtaccatctggtatcttttacaaagacaaattagcggtaatcggtaacggagtcgttgttgatccagttgcactattgaaagaattagacggattaaatgaacgtggcattcctacaagtaatttacgtatatctaatcgtgcgcaagtgattttaccatatcacttagcacaagatgaatatgaagaacgtttacgtggtgacaataagattggtacaactaaaaaaggtatcggtccagcatatgtagacaaagttcaacgtatcggtattcgtatggcagatttacttgaaaaagaaacattcgaaagattattaaaatcaaacattgaatataaacaagcatatttcaaaggtatgtttaacgaaacatgtccatcatttgatgatatctttgaagaatattatgcagcaggtcaacgtctaaaagaatttgtaacagacacatcaaaaatcttagacgatgcatttgtagcagatgaaaaggtacttttcgaaggtgcgcaaggtgtaatgttagatatcgaccatggtacatatccattcgttacatcaagtaatccaattgcaggtaacgttactgttggtacaggtgtaggtcctacattcgtttcaaaggtaattggtgtatgtaaagcttatacatcacgtgttggtgatggtccattccctactgaattattcgatgaagatggacatcatattagagaagttggtcgtgaatacggtacaacaacaggacgtcctcgtcgtgtaggttggtttgattcagttgtattacgtcactctcgtcgtgtaagtggtattacagatttatctattaactcaattgatgttttaacaggcctagacacagtgaaaatttgtacagcttatgaattagacggtaaagaaattactgagtacccagcaaacttagatcaattaaaacgttgtaaaccaatctttgaagagttaccaggttggacagaagacgtaacaaatgtgcgtactttagaagaattacctgaaaatgcacgtaaatatttagagcgtatttcagaattatgtaatgtacaaatttctatcttctcagttggtccagatagagaacaaacaaacctattaaaagaattgtggtagaactttatataagtcatgcacaatgattataaatacatgagccttctatctttattggtaggaggcttttgctatgtttgcttctgtatcgattcgattaattagataaaaaatactaatgtaaaggtgatatttgttagtcataatttagaagattagatgatatttaacgaaaattaagatgaaatacttgaatgtaagaagtctgatgtcgaaaatagctattaaaatagagtagacgtaagtgtaaatgaaagtatctaaaatggaaaaatttcaaaaatagcgtaattattataataaatagactgccaataaaatgcaatttttcacttataacattcttcaaaaaataatagcaaaattatgtaaaaaatatcttgtcatggcaagattggctgtgctataatctatcttgtgcttaagaacggctccttggtcaagcggttaagacaccgccctttcacggcggtaacacgggttcgagtcccgtaggagtcaccattttttaggtctcgtagtgtagcggttaacacgcctgcctgtcacgcaggagatcgcgggttcgattcccgtcgagaccgtacaaatgcctatccaagaggataggcatttttttgcgtttaatattatattaataaaagacatatggactaatgataatcatattgatttatctgttcgtccattttctttataatgtatgaacctcaagtaacttagtggttggatatgaaagataaacgtagacaaaaaactttattagacatacaaacatatgctactgtcaacatatttcttcgttgtgatatgccaccaattctccataacatcaattgttaaagtaacgaataatgatatttattttctgagcaatgacgtgcaactagaagttgccattaccctaattttattattggaatagggccctcatgattgtgttaaatatcattatcacaatccgccgtgagaaactaataaaaaatattaatatataagtttatattggaaaatagaattaatagcttataaatggtaaattatataataggttactatacgttataagacggaaaatgcgcacaataacaaaaatagtaagcgacatcctgtgattttttacacaaacataaacgataaagaacaaaaaatgataaaataatattaatgatttaagaaaagaggtttatgcaaatggctagaaaagttgttgtagttgatgatgaaaaaccgattgctgatattttagaatttaacttaaaaaaagaaggatacgatgtgtactgtgcatacgatggtaatgatgcagtcgacttaatttatgaagaagaaccagacatcgtattattagatattatgttacctggtcgtgatggtatggaagtatgtcgtgaagtgcgcaaaaaatacgaaatgccaattataatgcttactgctaaagattcagaaattgataaagtgcttggtttagaactaggtgcagatgactatgtaacgaaaccgtttagtacgcgtgaattaatcgcacgtgtgaaagcgaacttacgtcgtcattactcacaaccagcacaagacactggaaatgtaacgaatgaaatcacaattaaagatattgtgatttatccagacgcatattctattaaaaaacgtggcgaagatattgaattaacacatcgtgaatttgaattgttccattatttatcaaaacatatgggacaagtaatgacacgtgaacatttattacaaacagtatggggctatgattactttggcgatgtacgtacggtcgatgtaacgattcgtcgtttacgtgaaaagattgaagatgatccgtcacatcctgaatacattgttacgcgtagaggcgttggatatttcctccaacaacatgagtagaggtcgaaacgaatgaagtggctaaaacaactacaatcccttcatactaaacttgtaattgtttatgtattactgattatcattggtatgcaaattatcgggctgtattttacaaataaccttgaaaaagagctgcttgataattttaagaagaatattacgcagtacgctaaacaattagaaattagtattgaaaaagtatatgacgaaaagggctccgtaaatgcacaaaaagatattcaaaatttattaagtgagtatgccaaccgtcaagaaattggagaaattcgttttatagataaagaccaaattattattgcgacgacgaagcagtctaaccgtagtctaatcaatcaaaaagcgaatgatagttctgtccaaaaagcactatcactaggacaatcaaacgatcatttaattttaaaagattatggcggtggtaaggaccgtgtctgggtatataatatccccgttaaagtcgataaaaaggtaattggtaatatttatatcgaatcaaaaattaatgacgtttataaccaattaaataatataaatcaaatattcattgttggtacagctatttcattattaatcacagtcatcctaggattctttatagcgcgaacgattaccaaaccaatcaccgatatgcgtaaccagacggtcgaaatgtccagaggtaactatacgcaacgtgtgaagatttatggtaatgatgaaattggcgaattagctttagcatttaataacttgtctaaacgtgtacaagaagcgcaggctaatactgaaagtgagaaacgtagactggactcagttatcacccatatgagtgatggtattattgcaacagaccgtcgtggacgtattcgtatcgtcaatgatatggcacttaagatgcttggtatggcgaaagaagacatcatcggttattacatgttaagtgtattaagtcttgaagatgaatttaaactggaagaaattcaagagaataatgatagtttcttattagatttaaatgaagaagaaggtctaatcgcacgtgttaactttagtacgattgtgcaggaaacaggatttgtaactggttatattgctgtgttacatgacgttactgaacaacaacaagttgaacgtgagcgtcgtgaatttgttgccaatgtatcacatgagttacgtacacctttaacttccatgaatagttacattgaagcacttgaagaaggtgcatggaaagatgaggaacttgcgccacaatttttatctgttacccgtgaagaaacagaacgaatgattcgactggtcaatgacttgctacagttatctaaaatggataatgagtctgatcaaatcaataaagaaattatcgactttaacatgttcattaataaaattattaatcgacatgaaatgtctgcgaaagatacaacatttatccgagatattccgaaaaagacgattttcacagaatttgatcctgataaaatgacgcaagtatttgataatgtcattacaaatgcgatgaaatattctagaggcgataaacgtgtcgagttccacgtgaaacaaaatccactttataatcgaatgacgattcgtattaaagataatggcatcggtattcctattaataaagtcgataagatattcgaccgattctatcgtgtagataaggcacgtacgcgtaaaatgggtggtactggattaggactagccatttcgaaagagattgtggaagctcacaatggtcgtatttgggcaaacagtgtagaaggtcaaggcacatctatctttatcacacttccatgtgaagtcattgaagacggtgattgggatgaataataaggaacatattaaatctgtcattttagcactactcgtcttgatgagtgtcgtattgacatatatggtatggaacttttctcctgatattgcaaatgtcgacaatacagatagtaagaagagtgaaacgaaacctttaacgacacctatgacagccaaaatggatacaactattacgccatttcagattattcattcgaaaaatgatcatccagaaggtacgatcgcgacggtttctaatgtgaataagctgacgaaacctttaaaaaataaagaagtgaagtccgtggagcatgttcgtcgtgatcataacttgatgattcctgatttgagcagtgattttacattattcgattttacgtatgatttaccgttatcaacatatcttggccaagtactgaacatgaatgcgaaagtaccaaatcatttcaatttcaatcgtttggtcatagatcatgatgctgatgataatatcgtgctttatgctataagcaaagatcgccacgattacgtaaaattaacaactacaacgaaaaatgatcattttttagatgcattagcagcagtgaaaaaagatatgcaaccatacacagatatcatcacaaacaaagatacaattgatcgtacgacgcatgtttttgcaccaagtaaacctgaaaagttaaaaacatatcgcatggtatttaacacgattagtgttgagaaaatgaatgctatactatttgacgattcaaccatcgttcgtagttcaaagagtggtgttacaacctacaacaataatacaggtgtcgcaaactataacgataaaaatgaaaaataccattataaaaacttgtccgaagatgaagcaagttccagcaaaatggaagaaacaattccaggaacctttgattttattaatggtcatggtggtttcttaaacgaagacttcagattgtttagtacgaataatcagtcaggcgagttaacatatcaacgtttccttaacggttatccaacgtttaataaagaaggctctaatcaaattcaagtcacttggggtgaaaaaggcgtctttgattatcgtcgttcgttattgcgcaccgacgttgttttaaatagtgaggataataaaacattgccgaaattagagtctgtacgttcaagcttagcgaataatagtgatattaattttgaaaaagtaacaaacatcgctatcggttacgaaatgcaggataactcagatcataatcacattgaagtgcagattaacagtgaactcgtaccgcgttggtatgtagaatatgatggcgaatggtatgtttataacgatgggaggcttgaataaatgaactggaaacttacaaagacacttttcattttcgtgtttattcttgtcaacatcgtgttagtatcgatttatgttaataaagtcaatcgctcacacattaatgaggttgagagtaacaatgaagttaattttcagcaagaagaaattaaagtaccggctagtatattgaataaatcagttaaaggtataaaattagagcaaattacggggcgttcaaaagactttagttctaaagctaagggcgattcggatttgaccacatcagatggtggaaaattattgaatgcgaacattagtcaatcggtaaaggtcagtgacaataacttaaaagatttgaaagattatgttaacaaatgtgtgttcaaaggttcagaatatcaattaagtgaaattagttctggttctgtaaaatacgaacaaacgtatgataatttcccgattttgaataatagtaaagcgatgttgaactttaatatagaagataacaaagcggctagttataaacaatcaatgatggatgacattaagcccacagatggtgctgataaaaagcatcaagtgattggtgtgagaaaagcaatcgaggcattatattataatcgttacttgaaaaaaggtgatgaagtcattaatgctagactcggttactactcagtcgtgaatgaaacaaatgttcaattgttacaaccaaactgggaaattaaagtgaagcatgacggtaaggataaaacgaatacttactatgtcgaagcgacaaataataaccctaaaattattaatcattaatatgaatcgtaaaaagctagcattgcaagctcatcatatgtgagaagcggtgctagctttttgctggtacggtttattatggctgatgtttttgcgtcctaacttgcgcatttattcatatattaagtagaaccgcattgtaaaattagtgtaactgttattttaaaaactttagtatttgtctaatcattgttataataattaggacattcattgcacgtgattatcaaaatttaattataagagaccggtcgatgaactaaagttacataataggaaaggtatacaaaacagctaatatactgatagtttctgtagggaaaatcgtatatttgcactgatgtatattgcagtcatttagagagattgactgcttaaatagaaaggatgagccgcttgatacgcatgagtgtattagcaagtggtagtacaggtaacgccacttttgtagaaaatgaaaaaggtagtctattagttgatgttggtttgactggcaagaaaatggaagaattgtttagtcaaattgaccgtaatattcaagatttaaatggtattttagtaacccatgaacatattgatcatattaaaggattaggtgttttggcgcgtaaatatcaattaccaatttatgcgaatgaaaagacttggcaggcaattgaaaagaaagatagtcgcatccctatggatcagaaattcatttttaacccttatgaaacgaaatctattgcaggtttcgatgttgaatcgtttaacgtgtcacatgatgcaatagatccgcaattttatattttccataataactataagaagtttacgattttaacggatacaggttacgtgtctgatcgtatgaaaggtatgatacgtggcagcgatgcgtttatttttgagagtaatcatgacgtcgatatgttgagaatgtgtcgttatccatggaagacgaaacaacgtattttaggcgatatgggtcatgtatctaatgaggatgcgggtcatgcgatgacagacgtgattacaggtaacacgaaacgtatttacctatcgcatttatcacaagataataacatgaaagatttggcgcgtatgagtgttggccaagtattgaacgaacacgatattgatacggaaaaagaagtattgctatgtgatacggataaagctattccaacgccaatatatacaatataaatgagagtcatccgataaagttccgcactgctgtgaaacgactttatcgggtgcttttttatgttgttggtgggaaatggctgttgttgaaattaagggtctagttgaaatgtaaaaaataattcgatattaaatgtaatttataaataatttacataaaatcaatcattttaatataaggattatgataatatattggtgtatgacagttaatggagggaacgaaatgaaagctttattacttaaaacaagtgtatggctcgttttgctttttagtgcaatgggattatggcatgtctcgaacgcggcagagcagcatacaccaatgaaagcacatgcagtaacaacgatagacaaagcaacaacagataagcaacaagtaccgccaacaaaggaagcggctcatcattatggtgaagaagcggcaaccaacgtatcagcatcagcgcagggaacagttgatgatataaacaacaaagtaacttccaacgcaccatctaacaaaccatctacagcagtttcagcaacagtaaacgaaacgcgcgatgtagatacacaacaagcctcaacacaaaaaccaactcgcacagcaacattcaaattatcaaatgctgaaacagcatcactttcaccacgaatgtttgctgccaatgcaccacaaacaacaacacataaaatattacatacaaatgatatccatggccgactagccgaagaaaaagggcgtgtcatcggtatggctaaattaaaaacagtaaaagaacaagaaaagcctgatttaatgttagacgcaggagacgcattccaaggtttaccactttcaaaccagtctaaaggtgaagaaatggctaaagcaatgaatgcagtaggttatgatgctatggcagtcggtaaccacgaatttgactttggatacgatcagttgaaaaagttagagggtatgttagacttcccgatgctaagtactaacgtttataaagacgggaaacgcgcatttaaaccatcaacgattgtaacgaaaaatggtattcgttatggaattattggcgtaacgacaccagaaacaaagacgaaaacaagacctgaaggcattaaaggtgttgaatttagagatccattacaaagtgtgacagcagaaatgatgcgtatttataaagacgtagatacatttgttgttatatctcatttaggtattgatccttcaacacaagaaacatggcgtggtgattacttagtgaaacaattaagtcaaaatccacaattgaagaaacgtattacagtcattgatggacattcacatactgtacttcaaaatggtcaaatttataacaatgatgcattagcacaaacaggtacagcacttgcgaatatcggtaagattacatttaattaccgcaatggagaggtatcaaatattaaaccatcattgattaatgttaaagacgttgaaaatgtaacaccgaacaaggcattagctgaacaaattaatcaagctgatcaaacatttagagcacaaacagcagaggttattattccaaataatacgattgatttcaaaggagaaagagatgatgttagaacgcgtgaaacaaatttaggaaacgcgattgcagatgctatggaagcatatggcgttaagaatttctctaaaaagactgactttgccgtgacaaatggtggaggtattcgcgcttctatcgcaaaaggtaaggtgacacgctatgatttaatttcagtattaccatttggaaatacgattgcgcaaattgatgtaaaaggttcagacgtctggacagcttttgaacatagtttaggcgcaccaacaacacaaaaagatggtaagacagtattaacagcgaatggtggtttactacatatctctgattcaatccgtgtttactatgatatgaataaaccatctggcaaacgaattaacgctattcaaattttaaataaagagacaggtaagtttgaaaatattgatttaaaacgtgtatatcacgtaacgatgaatgacttcacagcatcaggtggcgacggatatagtatgttcggtggccctagagaagaaggtatttcattagatcaagtactagcaagttatttaaaaacagctaacttagctaagtatgatacgacagaaccacaacgtatgttattaggtaaaccagcagtaagtgaacaaccagctaaaggacaacaaggtagcaaaggtagtgagtctggtaaagatacacaaccaattggtaaagacaaagtgatgaatccagcgaaacaaccagcgccaagtaaagttgtgttgttaccaacgcatagaggaactgttagtagtggtagagaaggttctggtcgcacattagaaggaactgctgtatcaagtaagagtgggaaacaattgactagcatgtcagcacctaaaggtagcgcacatgagaaacagttaccaaaaactggaactgatcaaagttcaagcccagcagcgatgtttgtattaataacaggtataggtttaatcgcgactgtacgacgtagaaaagctagctaaaatatattgaaaacaatactactgtatttcttaaacaagaggtacggtagtgtttttttatgaaaaaaagcgataaccgttgataaatatgggatataaaaaaggggataagtaataagacatcaaggtgtttatccacagaaatggggatagttatccagaattgtgtacaatttaaaaagaaatacccacaatgcccacagagttatccacaaatacacaagttatacactaaaaattggacataaatggcaggaaaatatcaaaaactgcaaaaaatattggtataataagagggaacagtgtgaacaagttaataacttgtggataactggaaagttgataacaatttggaggaccaaacgacatgaaaatcaccattttagctgtagggaaactaaaagagaaatattggaagcaagccatagcagaatatgaaaaacgtttaggcccatacaccaagatagacatcatagaagttccagacgaaaaagcaccagaaaatatgagcgacaaagaaatcgagcaagtaaaagaaaaagaaggccaacgaatactagccaaaatcaaaccgcaatcaacagtcattacattagaaatacaaggaaagatgctatcttccgaaggattggcccaagaattaaaccaacgcatgacccaagggcaaagcgactttgtattcgtcattggcggatcaaacggcctgcacaaggacgtcttacaacgcagtaactacgcactatcattcagcaaaatgacatttccacatcaaatgatgcgggttgtgttaattgagcaagtgtatagagcgtttaagattatgcgaggagaggcgtatcataaatgatgaggttaaatattaaaaataatattaaatacattagtaacatctcagacataattttgattattagaaataaatttaaacttagaacagttataaacagaattatttgattatgtaaattggtacaacaattttagaccacattcttcattacagtatttaacgccaatggcgtttaaagatatacacatgaaaagtgtctaaaaaactgttgacattccactctatatttgattgtagttgtttatagatagtaagatcattcattatacatggatttttgtgacacaattccagacaaactaataaactaataaaataaaaaaataaaggcgcgaaaacaggaattattaaataaaatattaatttaataaggggaacaaatgaaaaatatagatatcgcaatttatgatatagataaagttatttgtaaaagtattgagaataactcatcagatttaggttatttatcacaaagtatcttatcacatttaagaaactacgtagaacatattggtatgaaatattatttcgaaagtgtaaatgaagatatgactaatagttcttcaaatatctataatgaaatacaaatgggaatagattattttaggaagcattacaaattgaattggcttaaaaattttcatgaattacttcagcaatctgtttctcattatacatttgatgaagatagatccgaacggttatttataaagtattatgacttaatgttagaattaaaagaaaagttaaagaaagattttgaaatggatttattgcaaagtttatataaagtaccgctgaatattgatagtgatttaaaaggatattatcatacaatatctcaattaataggtaataaatacactgataatgaatatgaagtagataattcaaggtactatattgaaaaaataaaaccatttgttattgaaaataaagtatattatgaaattacatttagaaatgcaaatgataaaactagtaaatacgaaagactgattggttattcaaaatatagaataaacacaaattatgctgtaaaattcgcattagaaaggcaaacaataagttatttagggattaaagctaacgtaataataataaatgattacgaaatatctataaggccttgtgaatttaataattttgctaaaatattagattacgatttaaaattacaaacaaatcataatgaatataaaaaattaatgaaattgttaaaagaatttaatttacatttacttgatattgttttgttagatgacgatgaatttaatgaattggagtgtttagtgaatagcgaatcagcagttattaatatttttaatgtgttgagactagcaagaagatatattttaacaaataaatcaggcgcaaatgttcttaggtatttattatttgtttttaacaataggataattcgtttacagttaccttatattaggaataaatgttataaattatctaaccttatattggattataaatgtgttccatttgatcaaatgccatttacagcctctttaaaaggccataatcctaatatctatactttgttacaatgtatagaatacaaagggagagaatatgaattattagtcaggaagattcaaaagaatactttgaagaataagaaagtttatacaatcaaagaagaaattgagcagtatggtgttgtaaacgaactaatcgataaatataataataatttgtattataagcatcgaccgaatagagaaatacattcatttggtgataattattatttatatgaaaatgagcagagtattatgagtataataaagtcaattaaactattgtcaaatgaaagcgtagagggctattcaaattcagtagagttttggctaaataatgaatatacatcgttggattgtaaagaaaagaaggaaatactcttaagaatgttttcaaatagcaaaatatcgatggtatacggagctgctggaacagggaaatcaactttaataaaccatatttgcaattttttctatgataaagatgttatcgtcatagcaaatactaatactgcagtagacaatattaaaagaaaaatcaaattatctaacattaaaacgtctactatttctaaatttttatataatgataaagaaaagtatgacttgttaataatcgatgaggcaggtacagttagtaataaggacatgaatcgaattcttgaaaacaagcaatttgaattattattaattgtcggtgataattatcaaatcgaatcgatagattttggaaattggttcgaaattgccaaagatgttttgccaaaaaatataatcaacgaactaactaatatgtatcgaactaaaaatgatgatttactttacttttggaaatctgttagagaaaaaaagagtaatttaaatgaaattattaatatgaataaatattctacaagattagatgaaagtatatttaatgaattcaataaagatgaaattattctttgtttaaattacgatggtatatatggtatcaataacattaatagattattacaagcaaataataaaaatgattctgtaatttggggtgtgaaagaatataaagttggtgatcctattctatttaatgaaactaataagtactcaccaatactttttaataatttaaaagggtcaataattgaaatatatgtttttgaagaatatatattgtttgatttagaaataaataaagttataaatgaacttgatattattttgttagaaattgatttaataagttcttctgaaaatagttcggtgattaggattagagtagaaaaaagtgatgggttgaatgatgatgataatgattcatctgatagtatagttccttttcaagtgagttatgcaatttcaatacataaagctcaagggttagagtttaattcagtaaaaattgttatatctgatgatttagacgaacaaatcactaacaatattttttatactgcaattacacgagctagagaaaatttaaagatttattggtcaccacgaactgaaaagaaaattattgataatataatttctaaaagaaacttgaaggatctttctatattaaaatctcgaataaaaaaacaaaatgcttagaaattttcatacgacgcttatatagaaccataaaaacgcgatttacgggaccatgtaaatcgcgtttttttagtaccatataaatcgttcgactagtaccagtgattttatttaatttttctcaacgactctacttctaaaaatattttaaatgactttgatacagcacaaattaaaatcgcataagcgatgacttttccacttaatttcttatgccattctacggaagtcatttgagaacaaagtattaatgatttttcaaggcttcttatttcgaatacctccatgagatactattgttcttgttcagttgtatacggcaataaaaaatcatcatttactaaaataaaagcgatgtaacttttaccatttccggtgacacctttttaaaccgccatttacataaatactatctttaaatataacttgattatttgaaagtatgtgaaagtaaattaaggattggtacgttttggttaattaaatatctacctaaatattcctctaattgacttgttgcatgttcattcagcaaaacaggaataatccatgctgtatataaataatcatctagaaattctctacatgtagaatattgtttttttaattcattgtcttttatatacaatgaagataatatttttccggaacctttatcttcatccatcttcttaaataagtcaccttcttgatttttaactaatttatattcattacccttaaattcatatttgaaatgtgattttccaactacgcaaaccatgccatcttttctttgagtaacatagatgtaatttattattgggttatttccattagccctattattatttgttaatgtgttacttatattagacaataaatcctcaaaatatgtaataatatattcatctaagggtttattgttattactaatattacaattttgtttgatagcataaaaagcttctaggtttaattcaaatggttccgcgctaacgattttgctatctttgttgtctataataaattcgattagtaatttcttaatcatttcgtgatgttttctaggcttattgtaatgacaggctttataaagctgtgtattaattctattaaacatttctatttgcaagtcagcaagaatagttctacagtcttcatagatatcatgtactgggtatggtttattaggaaacatgctatatatttctttatatgttgtattgaacacgttaattatacctcctactatctattaatactattgtaattatcagatataactaagtaaatgaatcgtctacacttaattggacaaattctatgagaatagatattgttaatttaagaaagaaattacgaatgaacgcattctcaaaaattgcatttaaataatgaaatatagagtaacttgagaaagttgtttcatctaaaatatataaacagtagaggggagaacttatgcactggaaagaaaatagaataaaatcagccaaaaatgacacgattcggatggtaatcaaagaattaaaaggtagttatgtggtttttggagatgttcagtttcttccaggttattgtgtattacttcctaaaagagaggtaagattattgaatgatcttactttagaagagcgacaaaattacttattagatatgagctttgttggtgatgctatgatgaaatcattgaaacctacaagagtaaattatgaaatactaggtaataaagattactttcttcatgcacatttattccaaagatatgaatgggaagatgaatctgttaggtatatgccagtgtgggcgtatgatgcttctaattggtctaatgaagaaacggcttacgattctgataaacatgatgaaattagaaataagataaagaacgaacttgaacaattgtataacatataaaccaaagaggctgggacataatgaaatgctcccttcaaagtagacattgaaaaaatgaaaactttgaagggagctttatttatgtcaataaaacctaaagtagacatagatgtactgctatatatgtttcaagaatatgaaaaaggcgtgtcgtttcaatacttaatcgatacattacaattagatattaatgtcaatactttgtatcctaagtataaatattataaaacccatggtattgaaacactacttacacaaaaacaatacaatcactattcaaaggaactaaaattaaaagttgtaaatgaatatttgaattcaaatcaatcaacccaagatctcgcaatcaaatacaatattcgtagttcgacacaagtcaaaaattggataaaaatgtatactgtaggaaaagagattaagagtcaatctccgaaaactggggtgtatatcatgaaagcaagaaaaaccacatttgaagaacgtgtcacaattgttgaatattacttgaatcataaacaatcttatagagaagttgcagaacactttaatatctcatacggtcaaatttaccagtgggttcaaaagtatcaagcacatggtaaaaatggattagtagatggcagaggcaaaggaaaaccgaaatctattatgacgccagaagaacaaaaggaagctgaaattcaagcattaaaagcacaaaatcgattattagagatggaaaatgacgttttaaaaaagtttcaagcattggaaagagagatgattcaaagagaaaacaaatcacggcatacaaaacgattgaagcgttaaaacatcaataccctatccaacgcttgtgtcgtattttaggcatttctagagcgagttattataagtgggtacattatcaatcgagtgaacttgaattagagaatgaacaacttaagcgagaaatagaatcaatctatcataagtataacggtatttatggctatcgtcgcatttatatctatattcgattaaaactaggtaaacaagtaaaccgaaagcgaatttatcgtttgatgaaagaacttaatttaaaagcggtaatacgtcaaaagcgaaaaccttatcgccgttcaacgccacaaatcacatcagaaaataagcttaatcgacaatttgacattgatacgccaaataaagtttggttaacagatgtaacagaatttaaaatcaaagaaggtagtaagatatatttgagtgccatttatgacttaggtgttaaacgtattgttagttatgagctaggcccttctaacaataatcaattagtatttaaaacattcaatcaagcgatagaaaaagtagaaaataccaaaggtattttatttcatagtgaccgaggttttcaatatacatcgaaaacatttaaacatatgttggatgaatgtgacatgattcaaagtatgtcacgtgttagcaaatgtatcgataacggtccaatggaaggtgtatggggtacaataaaaagtgaaatttttagaggaaataagcactttaaatttaatagtgtagaagaagctacaaaaacaattcatgattttattcttttctttaatcatgaaagaattacattaaaaatggctgattctgtataacaacaaaaccaaccattaattttaattatttaattgtctactagactgggtgcagttcataattcctagcaaaatagccagtaaatgagttttcataaattcatttactggcttctttatttacaatatttcgtattgttggctcgctttcttaggggacagcttcagcctgtagtcttcagctcgtcctgttccctcaagagtctcgccaaaatactttgtatttatatgtaattttacattgaaatacttaaaaaaaataaggccctttcgtataatttaataaataccaataaactaaattaacgaggtgccttatgtataaaaattataacatgacccaacttatactaccaatagaaacttctgttagaatccctcaaaatgatatttcacgatatgttaatgaaattgttgaaacgatacctgatagcgaattcgatgaattcagacatcatcgtggcgcaacatcctatcatccaaaaatgatgttaaaaatcatcttatatgcatatactcaatctgtattttctggtcgtagaatagagaaattacttcatgatagtattcgaatgatgtggttagctcaagatcaaacaccttcttataaaactattaatcgttttagagtgaatcctaatactgatgcgttaattgaatctttatttattcagttccatagtcaatgtttaaagcaaaaccttattgataataattcaatttttattgatggtacaaaagtagaagctagtgccaatagatatacatttgtgtggaagaaaagtattcaaaatcacgaatcgaaattgaacgaaaattcaaaagcattatatcgtgacttagttgaagaaaaaataataccagagataaaagaagatggagatagcgatttaacaatagaagaaatagatttaattggtagtcatttagataaagaaatcgaagatttaaatcattctattgagaacgaagattgtgctcaaattagaaaacagacccgaaaaaaaagaactgggattaagaagttcaaaaagaagtttgatgattattccgaaagaaaaagtaaatatgaagaacaaaaatcgattcttaaagatagaaatagcttttctaaaactgatcatgatgcaacttttatgagaatgaaggaagactatatgaaaaatggccaacttaagccaggatacaatttacaaatagcgacaaattctcaatttgttatatcctatgacctatttcaaaacccgacagatactagaactttaattccatttttaacaatgattcaaaataccttcggttatttaccggagtatattgtagctgatgcaggttatggtagtgagcaaaactatatggctattatagatgactttaataaaacgccacttattacgtatggcatgtttattaaagataaaacgagaaagtttaaaagtgacatttttaacactcaaaattggaaatatgacgaacttaatgatgaatttatatgtcctaataacaaaagaataggttttaaaagatatgcataccgtaatgatagatatggttttaaacgtgacttcaagctatatgaatgcgatgactgttcagcatgttctttgaggcaacaatgcatgaaaccaaattcgaaatccaataagaaaatcatgaagaattataattgggaatactttaaagcccaaattaatcaaaagctttctgaaccagaaacgaaaaaaatctatagtcaaagaaaaattgatgtagagcctgtttttggatttatgaaggctattttggatttcactcgaatgtcagttcgaggaataaataaagttaaacgagagctaggttttgtatgaatggcacttaatataaggaaaatagcagctcaacgagctgtacattataaaatacatatcaaaaaagctgatttctatcaaataaataatagaaatcagcttttttacattgcctaagaactttaagaacttaatgtcccaagctctacccctcattacatctataattctattttaaggtcttcgtccatttgggcttcaaattcatctagtaatgctcgtgcttctgcaattgattgtgtgttcatcaattgatgtcgaagttcgctagcgcctcttatgccacgcacatagattttaaagaatctacgcaagctcttgaattgtcgtatttcatctttttcatatttgttaaacaatgataaatgtaatctcaacagatctaatagttctttgcttgtgtgttcacgtggttctttttcaaaagcgaatggattgtggaaaatgcctctaccaatcatgacgccatcaatgccatatttttctgcaagttcaagtcctgtttttctatcgggaatatgggagtgggacagaaatgatattttctcaaaatttatttcgtcgtccaaccccaacttccattgtctgtagaatttcatttcgaaattctctgtgttggggccccgccccccaacttgcacattattgtaagctgactttccgccagctactatgttggggcccctgactttaattgaaaaaagcttgttacaagcgcattttcgttcagtcaactactgccaatataacattgtatagcatagaacattgatttatgtcccaacctccaatttcgtcacgtaaatttttaatagcttcgattaattcccaatgtgcatctactttactaatgcgtttgataaaaacttaaataatattaattcagtcatcagtggcattaaatcttttatcatttttagttatagttgataaatttatatttataagcatatatatggatatttcatcaaaaatttttattcatataaatccgaactgcatacatatttgttgaaataagaggtattatttttcgggaaattgctgtctgagttataaggattagttttataaaattagttgaattatagcaaaaacgattaaaatactgataatccatttttgtattatgttagggacttttttacttaattttaaccctattggagcaaatataatactccctattataaggaataaggcgtcatataaagggatataaccttgaataagtttgatgacaaaagcaccaattgaagatataaaagcaattactatactattagcgactacagtattcattggtaatttgaataaaaccaataatataggaataataatgaaggcaccacctgcacctattatacctgaaatgataccaatgaaaaggccaatgataactaataaatatttattaaatgaagacttttcggaactaggtttcactttaataaacattaatgttaatgcaagtaaagcaataatgatatataccgtatttacaaatgtagcatcaaataaatttgctagaaatgcacctaacatactccctataatcatgccgccacccatataaagaactaattgtggcgagaactctgttttttttcgagcttttaatgagccacttaatgtactgaaaaagacttggctagaagtaagacctgatgcgatatatgcgctatatgcaggggctccgaataatggtggtaataataaaatagctggataaataatgatagcaccacctacgcctactagaccagatatgaacccaccgaataccccaatgagtaacatgataactatattaacaatatccattacttacttttcaccaataagtttacagcttcattaattaactcttgggagctttcttcatcatccgcagctgcttttacgcattctattaaattttcactaataatgatacccatcaagcgttggagtgaactctttgatgcactgatttgtgtaatgacatctttacagtcttttccttcctccatcattttaataattccatttagttgcccttgtattctattaatacgattaatcatttttttatcataattcatagtcatacctccacttttaattgaataaaaatatattaatagataaacacaaatgtgtcaaatacccctagaggtatttggcaagttccattcaactgtttagaatacccctacaggtatttttagggaggttattatgaaacaatacggagaaaagtttatcgatgaatttagtaaagcagaattggaaaaactagcaaagcaagggcaattaattgatgttagaacagaagaggagtatgcattaggacatatcaatggttccatacttcatcctgttgatgagattgagtcattcaataaagaaaaaaataaaacctattatgtaatctgtagaagtggtaacagaagtgctaatgctagtaaatatttaactaaaaaaggttataacgttataaatcttgatggtggttataaagtttatgaagaagaaaacgatagttatgatacacaagaagaatataaaagtatagaaattaaagcagatcgtaaacaatttaactatcgtggtcttcaatgtccagggccaattgtaaaaattagtcaagaaatgaagaatattgaagtaggtgaccaaattgaagtcaaagtcacagaccctggattccctagtgatattaaaagttgggtgaaacaaacaaggcatactttagttaagcttgatgaaaataacaatggaattaatgcgattattcaaaaagaaaaagcaaaagatttagatgtaaattattctgctaaaggtactacaattgtattatttagtggagaattagacaaagctgtagcagcattgattattgcaaatggcgctagagctgctggaaaagatgtatctatcttctttactttttgggggcttaatgcattaaaaaaagcgcaaacagttaatgttaaaaagcaaggtattgcaaaaatgtttgatttaatgttgcccaaaaagaatatacgaatgcctctttccaaaatgaatatgcttggtttaggaaatatgatgatgcgctacgtaatgaaaaagaaaaatgttgattcattaccaacacttatcaatcaagctattgagcaaaatatcaaattaatcgcttgtacgatgagtatggatgtcatgggtattcagaaagaagaacttagagatgaagttgagtacggtggtgtaggcacttatattggtgctactgaaaaatgcgaatcataatttatttatctaattaaatctattaataaaaggagttgttatcatgttttttaaacagttttacgataatcatttatctcaagcatcatatttagtgggttgtcaacgtacaggagaggcaataataatagaccctgttcgtgatttatcgaaatatatagaagttgcagattctgaaggtttaacaattacacaagctacagaaacacatattcatgctgattttgcttcaggaattcgtgatgtggctaaacgcttaaatgcaaatatatatgtgtctggcgaaggtgaagatgcattagggtataaaaatatgccatcaaaaacacaatttgttaaacatggagatatcattcaagtaggcaatgttaaattagaagttctgcatactccaggacacacgcctgaaagtattagctttttactcactgatttaggtggtggttcaagtgttccgatgggattatttagtggtgactttatttttgttggtgatataggtagacctgatttattagaaaaatctgttcaaataaagggttctacagaaattagcgcgaaacaaatgtatgagtccgttcaaaatattaaaaatttacctgactatgttcaaatctggccgggtcatggtgctggaagcccttgtggtaaagcattaggtgccatacctatatctacaataggttatgagaaaattaataactgggcatttaatgaaattgatgagactaaatttattgaattattaacatcaaatcaaccagcaccaccgcatcattttgcacaaatgaaacaagttaatcagtttggtatgaatttatatcaatcatacgatgtttatcctagtttagataataaaagagtagcatttgatcttcgtagcaaagaggcctttcaaggtggccacacaaaaggaacaatcaatataccatacaacaaaaactttattaatcaaattggttggtacttagattttgaaaaagatatagatttaattggagataaatctactgttgagaaagcgaaacacactttacaattaattgggtttgataaggtagcaggctatcgtttgccaaaatcagacatttcaacccagtccgttcatagcgctgatatgacaggtaaagaagaacatgtattagacgtacgtaatgatgaagagtggaataatggacacttatatcaagctgttaatattccacatggtaaattattaaatgaaaatattccttttaataaagaggataaaatatatgtacattgtcagtcaggtgttagaagttcaattgcagtgggtatattggaaagcaaaggttttgaaaatgtggtgaatattagagaaggctatcaagattttccagaatcattaaaataatttaaggatgtggaaaaatgaataagcattatcaaattgttattattggtggcggtacagcaggtgttaccgtagcatcaagactattaagaaaaaatcaaaactttaaaggggaaatagcaattatagacccagcagaccatcattactatcaaccattatggacgttggttggtgcaggggtatctagtttgaaaagttctcgtaaagatatggaaagtgttatacctgaaggtgctcactggataaaacaggctgtttcaagttttcaacctgaaaataatagcgttattttaggagataatacagtcgtttattatgattttttagtagtagctccaggattacagattaattggtcttcaattaaaggactaaaagaaaatataggtaaaaatggtgtttgctccaactattcacctgactatgttaacgaaacttggaaccaaatttctaattttaaacaaggaaatgccatttttacgcatccaaacactcctataaagtgtggaggtgcgcctatgaaaattatgtatttagctgaagattattttaggaaacataaaatccgttctaacgctaatgtgatatatgcaacgccaaaagaagctttatttgacgtaggaaaatataataaagaattagagaggattgttgaagaaagaaatataacagtcaattataattataaccttgttgaaatcgatggtgacaaaaaagtggctacattcgaacatatcaaaacatacgatagaaaaacaataagttatgatatgttacatgtaacaccacctatgggtcccttagatgtagtaaaagaaagtacactttcagatagtgagggatgggtagatgttaacccaaccacattacagcataaaagctactctaatgtatttgcacttggtgatgcttcaaatgtacctacttcaaaaacaggcgcagctattcgtaagcaagcacctatcgtcgctaataatttattgcaaatgatgaataatcaaatgttaacgcatcattatgatggttatacttcatgccctattgttactggatataataggttaatacttgcagagtttgattataataaaaatactaaagaaacaatgccgtttaatcaggccaaagaacgtagaagtatgtatatatttaagaaagatttattacctaaaatgtattggtacggcatgctaaaaggattaatataataaagtacagaaaacaataaattttttaatgaaaaatcttttactataaaatattaagtatttaaatgacgtgtcagtgttgtgtttatatgtcgtgaatttttagctctaaatagtataagattgaaaaaggtgttactgttttaaatgatcacgatgaagtcattcaataagaatgattatgaaaatagaaacagcagtaagatgttttctaattgaaaatcatctcactgctgtttttttaaaggtttatacctcatcttctaaattatttaataataattaatggtatttgagcacgtttagcgactttatgactgacattaccaatatccatttcttgccagatattcaaaccacgtgtactcaaaatgatagcttggtatgtacctccaatagtaatttcaacaactttgtctgttgagcactaagagcaatgttaatttcataagttgtaaacaattttttaattggagtttttttctgagttaaacgatatcctgctgtatttttaattttgcaccatttccaaaaggataagtgatataagtaaaaaggcatcatcgggagttatcctatcaggaaaaccagataatacctaagtagaaagtgttcaatccgtgttaaattgggaaatatcatcctcaacctttattactcatactataattctattttaacgtcttcgtccatttgggcttcaaattcatcgagtagtgctcgtgcttctgcaattgattgtgtgttcatcaattgatgtcgaagttcactagcgcctcttatgccacgcacatagattttaaagaatctacgcaagctcttgaattgtcgtatttcgtctttttcatatttgttaaacaatgatagatgcaatctcaacagatctaatagttctttgcttgtgtgttcgcgtggttctttttcaaaagcgaatggattatggaaaatgcctctaccaatcatgacgccatcaatgccatatttttctgcaagctcaagtcctgtttttctatcgggaatatcaccgttaattgttaacaatgtatttggtgcaatttcgtcacgtaaatttttaatagcttcgattaattcccaatgtgcatctactttactcatttctttacgtgtacgaagatgaatagataaatttgcaatgtcttgttcgaagacatgcttcaaccaatctttccattcatcgatttcatagtagccaaggcgtgttttaacacttaccggaagcccacctgctttagttgcttgaataatttcggcagcgacgtcaggtcttaagattaagccggaacccttaccctttttagcaacatttgctacaggacatcccatatttaagtctatgcctttaaagcccattttagctaattgaatactcgtttcacggaactgttctggcttatctccccatatgtgagcgaccatcggctgttcatcttcgctaaaagttaagcgtccgcgcacactatgtatgccttcagggtggcaaaagctctcggtatttgtaaattcagtgaaaaacacatccggtctagctgcttcacttacaacgtgtcgaaagacgatatctgtaacgtcttccattggcgccaaaataaaaaatggacgtggtaattcactccaaaaattttccttcataatatatttataccctctttataattagtatctcgattttttatgcatgatgatattaccacaaaagcctaacttatacaaaaggaatttcaatagatgcaaccatttgaaagggaagtataagagtagtctaaaataaatattgtggtaagttgatcaatacaaagatcaaggattatcgtattaaattgttcattattaatgatacactacttatgaatatgattcagaattttctttggctacttttacagtaaagcgattttttagttatcttataacaaagacaaatttataaaggtgatattatggaagatttaaagcattctttaaaaagtttaggttggtgggatttattttttgcgatacctatgtttctgctattcgcataccttccaaactataattttataactatatttcttaacattgttatcattattttcttttccataggtttgattttaactacgcatataattatagataaaattaagagcaactcgaaatgaatcattaatacgaatgtgattaaacataaaactgaaggagcgattacaatggcgactaagaaagatgtacatgatttatttttaagtcatgtgaattcaaatgccgttaaaactagaaagatgatgggagaatatattatttattatgatggtgttgttataggtggtttgtatgataatagattattggtcaaggcgactaaaagtgcacgtcatcaatttcaagataacacattagtatcgccgtatccgggtgccaaggaaatgatattaattccagactttgccgaagcaacaaatctaaatgatttatttgagctcataaaaaatgatttgaaaaacacatcataaattgccatactcaactattttgaaaagcatcatttccatattatcaaattattgagtatctcgatttattgttatacacaaacagtatttttgttatcatagagtttataaatataataaattgaataagtaactttacaaaactagaatgattcaattcaatcacaattatttgaaaatagaggtgagcaggtgaacgatatgttaattagtctcgtaatcccagtttttgctttgttagttattggtggtattatttggatgattatagaaggtatagtacatatttcaaaaaagaataaagcaattgataacttttttaacaaagttaataaagtaagtgagacatataaattcgctactacttttttatttctaatcttggctacggctggtatttctcaattttatctatattatatagtatcagagtttctttttttgctggttatatttacctttggtattgcaggtatcatttttttaatgccatatggcttatgtttcctaccactttatacgcaaaaaaagaaaaaacagacatttaaaaaatacatggcttacactacgattggtttgtcaatttatctaggcttatctctagttttggttcacactacgaaaatttatatggacgaaggtggcgtaagatactattacggtagttttgtaatgaaacaagcgggcggttatgcttatttagctttagcagtactttcaacgttgttaattgttgcgaaaaaagctacaaataaaaataaagaaaccgaaaccgtcgacaatacaaatataacggaaagataattaagggagtgctcattcaggagtgctcttttttgatgtccaaatttagttgcaaatgaaggcatagaagaaatttttatagtcatttattggataatgaattatggtcatatcgattaattttattagtgaggattttacaaacatttgttgaataaatatggtaatgataatatatgaatatttttgaaaaaacactaatatgattaaattatttgttaaaatagcattaagtaaaaaacaaacagggaacaaggtgggatttcatgagtcaattgctaaatgatacgttatcggcttggttgttaattgaatctttaagtccaggagaagtaaattttacagcggaagatatactctcagctgaacattttaaaaatggtacaaagcaagcgcaacttcaaagttttgatgaatattttgaaatatggaatgatgaacgctttattatatcagaagaaaaatcagagattggcgaaatcatttttaaattttacagacattgtttccgctatagtgaaattaatttgaaaattcaggatatttttgatgattattcagatattcataatccaaatgggacacactgttatggttacacatttaatatagataaacacggtaaagtgatagttgattctatacatattccgatgattatgagtgcattgaaagaaattgaaaagaataaaaatgctaatatagaagaaaaatttaatgattctgttgaaaaatttgttcaaaaagtaaaagaaattttagcggatgaaccaattaatgaatttaaattgaagaagatggacatagcttatgatgagtatttttctgtattaaattcaaagaaagatggattatttgcgcattatgtagcaatagaatatgtgaaagatagtgatttaccacagccagaatttaatagcttcttcataagtgatattgagaaagcaagaaaatctcccaatcaaactttaattgattacattgaaggtgtagaagaaagtcagcgcatagaagtagatgaaaataaagaaatgtttgacaaatttttacatccttcacgtttgcctgatggacgctggccatcacagactgagtttagattgtctttaatgcaacaacttgctgtaaaccaaatcacgagtggtaatgaaagaataagttctgttaatgggccaccagggacaggtaagacgactttattaaaagatatatttgctcatctagtagttgaaagaggcaaagagttagccaaactaaataatcctaaagatgcatttgtcaaaacaaaaattcatgaaacagatgataaatacgtctatttacttcaggaatctattgctaaatataagatggtagttgcgtctagtaataatggcgctgttgaaaatatatctaaagatttaccgaaaattgaagaaattataagaaatcctgaaaaatgtaaattcccggaatatgaaacagcttatgcaaatttagcatatgaattaaaagattttgctgaaatagctgaagatttgattggggaaagtgcctggggcttattttctggggtgtttggaaaaagtaccaatattaatcaagtattggatcacatgttaaaacaagatgtgaatgatattggctttgctagattacttcaaaatgaaaataatcgtatgggttatcacgagttaatgactgaatggcaagcacatcaacgtgcatttttagaagagttgaagcatgttgaaatgttaaaagaagaatctattagagcctatgatgtttataaaagttgtgagtcttactctaagatggaacaggcaattaatagtgaaaaaacaacaattgaagaacagatatatcatttagaaaatgaagcgttacgagacaataaagaaattgaagatttggatgatcgaattaattataatacaaagcaactcgaaactttaaatgagttgattaaatccatcagagatagtaacaaagggtttgttaacaagctgaaggcgatatttaattcagaagaagatgaaagatataaaaaacataatgcagagaagcaacaattattaggacaacagatagagttagagaaatgtaaaaaaaataaaaatgaagaccttgttagcaaactaaaagaaaaagagaaattaattaaacaattaactaaagtacagttgcaattagacgagttaaattcacagttacaagagttagaagcatatcgtattgagtcaaaaattacaattccagaaaaagatttttggagtgacaacaattatgatgagcgccaagttactaatttgtggacgagtgacgaacttcaatacagacgtgccatgctctttttaagagcaatgatattgcataaattattattgattgctaataatacaactatttattatgcgattaatgattttaaagatagaaggaaattaattgatgcaaatccagataaagtacacaacgcatggaatgtaatgcatttaatatttccagtagttagtacgacgtttgcaagctttaaatctatgtatgggggaataccaaaagatttcatagactacttatttattgatgaagcaggacaagcaatacctcaagcagctgtaggggcattatatcgttcgaaaaaagttgtagctgtaggtgatccgattcaaattgaaccggttgtgactttagaaagtcatttaattgataacattcgtaaaaattatcatgttccggaatatctagtttctaaagaagcttctgtgcagtctgttgcagacaacgccaatcaatatggcttttggaaatctgatgctactgatagtaatcaaaaaaactggataggcatacctttatgggtgcatagacgatgtttaaaacctatgttcacgatagctaatcaaatcgcttataataataaaatggtgctacctagtaatattacaaacgtaggtaagaccggttggtatgacgttaaaggaaactcagtacaaaaacaatttgtgaaagagcatggcgaaaaagtagtgggattattagctgatgattggattgaagcaattaaggaaggtaaaaatgaaccgagttcatttgtaatatcgcctttttcagcagtacagcaacagattaaacgtatgttaaagcaacaactaccgactagaattgatattgaacgtacaaaaattaatcaatgggtcgataaatccattggtactgttcatacttttcaaggtaaagaggctcaaaaggtgtattttgtaataggtactgataatactcaagatggtgctgtgaactggtcatgcgaaaaaccaaacttgttaaatgttgcagtgacaagagctaaaaaagagttttatgtaattggtgacatgcaaagaatacagtcgaaaccattttatgagaccatttttaaagaaagaaatgtaaaatgaaatgacagcatttctataggctaatcaagtgatacttaattaccgagcaatttttacattttaaaaggagcaaaattgaataatgaagaaatttaacaactgtatattaaatgcaataagtggatctcaaacagacaagaatgaaacaactgaagaattaaaaggggcaaaatttatcattttatatgcatattcaatgctcgttttgcttgcgttagtaatttctaacatattcattcacattttggagcctaaactatcaattaccactgaaatcatcatcgttttgattttaattgaatcactaattggactacgtttcttgaaagagtacgatgttaagcgtggcaaagataaagaaaataagaaaaatagtaaggatttcattaaactaaaatcaattttagtagcaattttatttacatcattggcgctgacagcaggtactgtagctgatatatacggtatcactgacttaggaaatactagaagtgatttaatcgtttggagcataggtggtattatatttggcctcgtatgttacacaatggaagataaaaaataaagataaggggctggcgattattgaactgcacccagtctagtagacaattaaataattaaaattaatggttggttttgttgttatacagaatcagccatttttaatgtaattctttcatgattaaagaaaagaataaaatcatgaattgtttttgtagcttcttctacactattaaatttaaagtgcttatttcctctaaaaatttcactttttattgtaccccatacaccttccattggaccgttatcgatacatttgctaacacgtgacatactttgaatcatgtcacattcatccaacatatgtttaaatgttttcgatgtatattgaaaacctcggtcactatgaaataaaatacctttggtattttctactttttctatcgcttgattgaatgttttaaatactaattgattattgttagaagggcctagctcataactaacaatacgtttaacacctaagtcataaatggcactcaaatatatcttactaccttctttgattttaaattctgttacatctgttaaccaaactttatttggcgtatcaatgtcaaattgtcgattaagcttattttctgatgtgatttgtggcgttgaacggcgataaggttttcgcttttgacgtattaccgcttttaaattaagttctttcatcaaacgataaattcgctttcggtttacttgtttacctagttttaatcgaatatagatataaatgcgacgatagccataaataccgttatacttatgatagattgattctatttctcgcttaagttgttcattctctaattcaagttcactcgattgataatgtacccacttataataactcgctctagaaatgcctaaaatacgacacaagcgttggatagggtattgatgttttaacgcttcaatcgttttgtatgccgtgatttgttttctctttgaatcatctctctttccaatgcttgaaacttttttaaaacgtcattttccatctctaataatcgattttgtgcttttaatgcttgaatttcagcttccttttgttcttctggcgtcataatagatttcggttttcctttgcctctgccatctactaatccatttttaccatgtgcttgatacttttgaacccactggtaaatttgaccgtatgagatattaaagtgttctgcaacttctctataagattgtttatgattcaagtaatattcaacaattgtgacacgttcttcaaatgtggtttttcttgctttcatgatatacaccccagttttcggagattgactcttaatctcttttcctacagtatacatttttatccaatttttgacttgtgtcgaactacgaatattgtatttgattgcgagatcttgggttgattgatttgaattcaaatattcatttacaacttttaattttagttcctttgaatagtgattgtattgtttttgtgtaagtagtgtttcaataccatgggttttataatatttatacttaggatacaaagtattgacattaatatctaattgtaatgtatcgattaagtattgaaacgacacgcctttttcatattcttgaaacatatatagcagtacatctatgtctactttaggttttattgacataaataaagctcccttcaaagttttcattttttcaatgtctactttgaagggagcatttcatataaagctagctccttttttaacttatatatgtaaagaactatcctaaggttttttaatcacacgtcattaatttctataattaatactcttgaatattgtttaaataagttttaaaattttacacatatttttatttaaaaaagatgtataattaatgtattaaatatagaaagaagttgatattatgaaaaagtgtattaagactttgtttttaagtatcattttagtagtgatgagtggtttatatcattcagcacatgcgtcagattcgttgagtaaaagtccagaaaattggatgagtaaacttgatgaaagcaaacatttaactgagattaatatgccaggctcacatgatagtggctcattcactttaactgatccggtaaaatcagtttgggcaaagactcaagataaagattaccttactcaaatgaagtcaggagtcagattttttgatattagaggtagagcaagtgctgataatatgatttcagttcatcacggcatggtttatctgcatcatgaactagggaaatttttagatgatgctaaatattacttgagtgcttatccaaacgaaacaattgtgatgtctatgaaaaaggactacgatagcgattctaaagttacgaagacatttgaagagatttttagagaatattattataataacccgcaatatcaaaatcttttttatacaggaagtaatgcgaatcctactttaaaagaaacgaaaggtaaaattgtcctattcaatagaatgggaggtacatacataaagagtggttatggtgctgacacgtcaggtattcaatggacagacaatgcgacatttgaaacgaaaattaataatggtagcttaaatttacaagtacaagatgagtataaagattactatgataaaaaagtagaagctgttaaaaatttattggctaaagctaaaactgatagtaacaaagacaatctatatgtgaatttcttgagtgtggcgtctggaggcagcgcatttaatagtacttataactatgcatcacatataaatcctgaaattgcaaaaacgattaaagcaaatgggaaagctagaacgggttggctgattgttgactatgcaggatatccgtggcctggatatgatgatatcgtaagcgaaattatagatagtaataaataaggattcaataatgatattaagacgagtatgaaaatagttagattctaattattttcactactcgtttttattttgaaattaagtaataattcaacaatattataaattgaacagattgtttgtgaaatctttgataatattaaagtgaaaaagtgttataaattgatattaatatgtaatttgcaaaagtaaatcattttaaaaagaagagagttgtaagatgatgaaacgattaaataaattagtgctaggtattagtttcttatttttaacaatttttattggggggtgtggcgtgggtaaagaggtggaaattaaaaaagttttgaaaaaacgttgagtatgtatccgattaaaaacctagaggatttatatgataaagaaggttatcgtgatgatcaatttgataaaaatgataagggaacatggattattggttctgaaatggcaactcaaaataagggtgaagctctgaaagttaaaggtatggtcttatatataaatagaaatacaagaagtgcaaaaggattttactatgttaatgcgataaagaaggatgaaaatggcagacctcaggataatcaaatagaatatcctgttaaaatggtcgataataaaatcattccaacaaaagatatcaaagatgaaaaaataaaaaaagaaattgaaagctttaagtttttcgcgcagtatggcaattttaaagatttgaaaaattataaagatggagatatttcatataatccagaagctccgatttattcagcaaaatatcaactaacgaatgatgattataatgtaaagcaattacgtaaaagatataatataccaacgaataaagcacctgagttattattgaaaggttcaggaaatttagatgattcatcagttggatacaaaaaaattgaatttactttcgtagagaaaaaaggagaaaacacttactatacggctaacctacattttaaaccgagtgaggataaataatcatccacacacacgattcaatatgaaattcaaatatgttgctgtaaaataatgtaaaataaacgtattcatattactgaattgagggatagtatgcaacgtgattatttaattcgagtagaaactgaaagtatgtcagatttcaaaaggctcaatggtttaatgattggttttgttattaaaggtgaggcacatatttatgatgaacataatatgatgcaatgcaacagtggcgacattttcatcattaaccaccgcgacttgtatcgatttcaacttcaacaagatggcatcatatgttatatccaattccaaatgaaatatttagcagacaagtttgatgatgtgcattgtctatattttcacttaacagatgcgaccacaaccaaaaatatacatcaactgagaaatataatggcaagactggtttcaacacatattcgacataatgagttgtctaaattgactgagcaacaacttgtgattcagttgcttatgcatatgattcattatgtcccgcgtacatatcattcgaaccaaagtatcttaaatgatgataaagtgaatcaagtatgcgactatatcgagttacattttcatgaagacttaagcctttcggaattaagcgaatatgttgggtggtcagagagccatctgtctaaaaagtttgcagaatcgctaggtgtaggattccagcatttcttaaatacgacgcgaattgaacatgcgaaactcgatttgacatacacagatgaaacgattactgatattgcattgcaaaatggcttttcaagtgcagcgagctttgcgagaacatttaaacactttacgcatcaaacgcctaaacaatatcgaggtgatcgtccggcaatcactgaaaatcaacaatcggcacaacataattatcacgaccgtgaattgatattacttttaaatgactacattgaagaaatgaatcatttcattgaagatattgaaaaggtgaactataaagagattacctttcaaccaaccaatcaccaactaaatcaatttaaccatattattcaagtgggctatttgaggaatttgctcaatacacagtatcaatcacagttgcttacatgtcatcatgattttcaagtcaatgaagtattagcatatgatgtgatgccatatatcatgaaaaagctcaatgcgccattcacgtatgatgcagaaatttcgaatatattttatgatatcgatttgtgtttagactttttattagatcataactttagtttgacaatgcatttggatcagtatgactcacgtgattatatcgatgcatttaaagtatttatccatcacgttgccctgcatgtcagtcatagaaaagatttgaagttcaacttgtatgtgacgacattgcacacgtctttgattgaaatgactgattattttaaagcattattccctaatggtggcttgtacattcacttagatcaagctacggaaagacaactaccattgctgaaacgacttgagccacacatcgaccattttgtatttgatgccaattcaaatgatgctgttgattttaataaaatgaatgatgatgaatttaaaaccgcaagtcaaatgattattaataaaacgaattaccttatcgatttaatgcatcgtcatcacctaaagcgtccactcattttactcaattggaatacattgacgggcgatacatttattacaaacggcgaatattttagaggtggtatcatcattgagcaattattaaaattaagttctaaagtagagggtatcggttattggttgaactatgatttgcacgtcagtcattgtagaaatgaacgcgattatatgaattcaattgaactgtttcatcaatataatggaaaacgtccggtctatttcacggcattgctatttaataaattaacaagcaatattttatattctgatgatacatgtattgtcacgggaactgattcaaattttcaaatattgttatatgatgcaaagcattttaatccgtacttagcgttggacaatcaaatgaatatgcgtgcaacggaaatgattcatttgaacattaatgccctggaagaaggtatgtataagattaaacattttaccttagataaagaaaatggtgcattatttaatctttggcgaaaacatcatacgatacatggtatggacaaggactctatagattacgttaatcgaatgagttttccaaaattagaagtgtacgatatagatgtgacggatacgctggcattaaatattaaaatgattacaaatggaattcacttaattgaagtaaaacgttacccaagttcataaaatgatcacaaatcacaatttatgttatacataatttgtgattttttgtattcaaagttaaaattgcaaaaaattaatggttaacatctctgttgttggcaatataaataatgatcaatcatatatgatgtaactaaggagatgaatgatatgaatcaacaattaattgaagctttaaaatcaaaagaagacaaaatgattgagatcagacgttatttacatcagcatccagaattatcttttcatgaggatgaaacggcgaaatacatcgctgaattttacaaaggtaaagatgtagaagtagaaacgaatgtcggaccacgtggaattaaagtaacgattgattcagggaaacctggtaaaacattagcaatccgtgcagactttgatgcattacctattactgaagatacaggattatcttttgcatcacaaaataaaggtgttatgcacgcatgtggtcacgatgcacatacagcatacatgcttgtattagcagagacacttgctgaaatgaaagatagttttacaggaaaagtcgttgtgatacatcaaccagctgaagaagtaccaccaggtggtgctaaagcaatgattgaaaatggtgtattagacggtgttgatcatgtattaggtgtacacatcatgagcacaatgaaaacaggtaatgtgtattacagacctggatatgttcaaacaggacgcgcattcttcaaattgaaagttcaaggtaaaggtggtcatggttcatcaccacatatggccaatgatgccattgttgcaggtagctacttcgtcacagcgttacaaacagttgtatctagacgactaagtccatttgaaacaggtgttgtcacaatcggttcatttgacggtaaaggtcaattcaatgtcattaaagatgttgttgaaattgaaggtgatgtacgtggattaacagatgctacaaaagcaacaattgaaaaagaaattaaacgtttatcaaaaggattagaagcattgtatggtgtaacttgcacattagaatataacgatgattatcctgcattatataatgatccagagtttactgagtgcgtggctaagacgctaaaagaagcagaccttgaatttggtgtcgaaatatgtgaaccacaaccaccttcagaagactttgcatactatgctaaggaacgaccaagtgcctttatttatacaggtgcagctgtggaagatggtgaaatttacccacatcatcatcctaaatttaacatttcagaaaaatcattacttatttcggcagaagctgtagggacagttgttttagattaccttaaaggagataactaacatgaatgaaacgtatcgcgggggcaacaagttaatcttaggtattgtattaggtgttattacattttggttgtttgcacaatcacttgtaaatgttgtaccaaatttacaacaaagttttggtgcagacatgggaacaattagtattgcggtaagtctaaccgcactattttcaggcatgtttgttgttggagcaggcggcctagcagataaaattggacgcgtgaaaatgacaaatatcggcttattattaagtattattggttcagcattaattattattacaaatttaccagcattgctaattttaggccgtattatacaaggcgtatcagcagcgtgtattatgccttccacattggccattatgaaaacttattatgagggtgctgaacgtcagcgtgccttaagctactggtctatcggttcttggggtggcagtggtatctgttcactcttcggtggggcagttgcgacaactatgggttggagatggattttcatcttctcaattatcgttgccgtactttcaatgttactcatcaaagggacgcctgaaacgaaatcagaagttaccaatacacataaatttgacgttgcaggtctaattgttctagtagttatgttattaagtttaaacgttgtcattactaaaggtgcagcacttggttatacatcattttggttctttagtttgattgcaatcgtaattgtagcattctttatgttcttaaaagttgagaaaaaagtagataatccgcttattgattttaaattatttgaaaataaaccatatacaggtgcaacgatttcgaacttcttattaaacggtgttgcaggtacattaattgtagcgaatacattcgtgcaacaaggtttaggttatacagcattgcaggcaggatacttatcaattacttatttaatcatggtgctattaatgattcgagttggtgaaaaattattacaaaaaatgggttctaagcgaccaatgttattaggtaccttcattgtaatcattggtattgcacttatttcattagtattcttaccaggcatattttatgttatcagttgtgtcgtaggatatttatgtttcggactaggcttaggtatttatgcaacaccttctacagatacagctatttcaaatgcaccgttagataaagttggcgttgcttcaggtatttataaaatggcttcatcacttggtggtgcattcggtgtcgcaattagtggtgcagtatatgccggtgcagttgctgcaacgagcattcatacaggtgcgatgattgcactttgggttaacgtattaatgggaatcatggcatttatcgcaattttattcgcgattcctaatgatgataaacgtgtcaaagatgcgaaataataacgatgacacgcccagtgttttgataatgatttaaatgaaaataaagcaaattaaatgaggaaatgtatagagcagtgcatatagataaatctatgattggattaacactaatataaatataaatgaaaaaccatccacttaaacttttgataagttaggtggatggttatttattgcgttgttctaaaatttggacatttatatggaaagaactatatataatgtgaaggttatggcaattcgcttcaatgaaggcgacgtgtaaaagtgtatattaaacgtttcggggtcagactccgagaacagtgtccgtcatgcttaccgcatactaatgaagcattattatatcagtgtttatagccgatttaagataataaagtttgctaaacaaaaaagccaacccatgaatgttggattggctttgtataagcatattaagttctaatttttatataaggtatgaatataaataagacattaaaaattaaatttcagttgttgcaatttcttcatctgtaggtacatcatcgttaagaccaacaagtgcttcagaaacatttcgtgaatgataaccgatacgttcaagaacaccaatcatatcgatatatagtaatccgccttttgttgtacattcaccacgattaaggcgtttaatatgacctttgcgtagtttatgttcaatattaaatgattctctactacgttctacaatttcatcttttttcgttttgtcataaacatctaacatgtcgatggctttatcaaatgactcagcaacatggttgaataatttatccataccgcgttgtgcatcttctgtaatgcgaatatcttcatcatgttggcgttttaattgagcgacatactcttctgttagctctgctacttttaaaatagagcgattgacatcaaacataactgctaaacgctcaacgtctgccttcgtaatggcttttgtagaaattctaactaaataatttcgaatactatcattgattgtttcaacagcttgatgcttttgttcaagctttttgattaattttttgtcgtcttttgtaatttcgcgaatgtcttcaaacattgataagacaatctgacccacattttgtaattctttttgagtttcttgtaatgcaacaccaggtgcgtgataaacaagatctttgtttaagtgctgaggtttatagtcatcagcaatatctttacctgggacaagctttgtaactatccatgctaaacctgctacaaatggtaattgaatcaaagtatttgttatgttgaagataccatgtgatactgcaatcgtcatcgctggttttaagtgccatacatcttgtaacaaactaatcaaatgaatcacaactggcaagaaaattgtgaagataattaccccgattaagttaaagatgacgtgtacaagcgccgcacgttttgcagcgattgagccggctaaactagctaagatagctgtaatcgttgtaccaatattatcgcctagtaacacagggattgctgcgtttaagctaattaaatcttgttgataaaattcttgtaaaataccaatcgtcgcacttgaactttgaactagtgctgttaaccctgcgccgacaatgacagcgagtattggatttgtagacatatcaagcattaattgcttaaatccatctaatgatgctaaaggtttaacggcatcacccataaattctagaccgaagaatagagaaccgaaaccgaatagtatgcggccaatgttattaattttagagcgtttaaagaaaaagattaaaaatgcacctaatgctaaaattggcattgcatattcgcctaaatctataccgataataaatgcagttaccgttgttccgatattagcacccattatcactccaatggcttgtttcaatgtcataaatccagctgttaccagtccgattgtgataactgtcgtacctgaactactttgtattaaaatagttacaacgatacctgcaataacacctaatactggatttgatgtaaatttgtttaaaatatctcgtagcctgtctcctgctgatgcttgaagcccgtctcccatgatttttaagccgtaaaggaaaatacctaaaccacctaaaaaggagaaaatgacttctgtaaccgacatttccattatttcacctcaaataagctttatatttagattatcgcttataattgtaaatttaatgttaagattaggtaaaattatttaacaatatatgttatttgtatatgacttgtaaaatatcatcacttattatgtaaattttcagtgtgaaatggcagatttgcaatcacttgtttaacaaaatgatgcaatcaatcatacaattatgtgtcatcaaaaaaatcatgtgagtgggataacgaaataaagtttgtgaacatatcatttctatcccactccatgatttgaaatcaccatatagacatgatttaatgtgcctcgttataacaatctgtgttcttttaataatgactcaatgtacgtaccttttatctttttaaggaatcctgctaatgcgagtttctgcattttcgaatctttagtaatctcgcgcaaatcttgatggtcattcagttcgtatacggcatccattaagacgcgaagatcaaatgtactattgatgacctctggaataccacgatctatatttagtaattgataaacagcttccatggcagtacgaaccgaatattctgttgtaaatacagtatctcgctctgtttctgcaaagttaccaataaatgctaaattttgtgattgatgcgggacgactaaaggtctgtcgccgatagcacgcgtcatgaaataagaggtaatatatggcatataaacaggaatcgtattagatgcatgttttgctaagtcttcaattttgtcagttggtacacctaagtgatacagccattcttggcatatttcattaccactacattctgtgattggctttttaatataatcgccgtttacatctgaatataaggcataaatccacgtagatatttcatttttaggttggtttttaaactgttgctgacgattgattgtaaaactgatttgccatgcagaatcattgattgtaataataccgccagtaaccgttttacctgcaagtggatcacgtttacaaatgctttctattgtatcgataatatctttattgtttgttgtcgatgttgctgaaacaaaccaactttttttgggaatattttggcaaaacttatcaggattaccaaattcaggactttgtcgcgctaaatttttccatagtgtccaactaccacctaattcgtcagttggtggcgctggtgtatcattatcaccataagtagagctttctgtaatactaccgtttgtcacaaagacaagatcgtttatagtcagtttaatagattctgcattaccattacggtcaattaatatttctcgggcaattttttgacttgtcgtaacatctactttaatatcttctacttttacatcgtattcaaattgaaccccatgcgattttaaatattcaaccataggtaatactaaagattcatattgattatatttagtgaattttaaagctgaaaagtctgcgagaccaccaatatgatgaacgaatcgcattagatagcgacgcatttccatagcagaatgccacggttcaaatgcaaacatcgttttccagtaaatccaaaagtttgaattaaagaaatcgtcggaaaatacatctgttattttgacatcatctaaatcttcttcattcgttaagcataaatctaaaatttctttaatcgccgttttagtcaaagtgaaatctccatctgtgactaaacgttgaccctgtttctcaataacacgacaacgagaatagttagggtcttctttgtttaaccaatagaattcatctaatactgacgcatgatcaatttcaagtgaagggatagatctgaataaatcccacaaacattcaaagtggttctccatttcacgaccaccacggacaacatagccttttaaaggcatattttcaccatcaagactaccgcccgctttgggtaactcttctaaaatatgaatcttagaaccttccatttgaccatcccttattaaaaaacaagctgcagcaagtgaagctagaccagatccgattaagtaagcggatttgttttctacattttcaggttttttagggcgcgcaaatgcttcataatttccataactgtaatacatatccaccaagtcctttcgtattataatacactcagactatacccctttgtgaattgcaaatattagtatttatattggtaaatttgacgaaattagatcttttttatattttttgatttttaaaattttatcactcgaatgtttttggattctgaggtgcgggacttggaataattcgaatcattatgtggcatgttaaacagctaaatataagctatgcacaattaacaagcggatactcctgacgcaattatagtatcattacatattgtttaatcgtttggggtaatgtaattaaaaggtaaaataggcagagtgttatacataaaatgtaaagagagaggcgatagaatgtctaaaatcaggtcttttacaatattaagtctacttatttacttagctatgatgtgctatacagtagtgacctattcaaaattaccaaccaaagtacctattcactataatttagcaggggatgctgataactttgctgataaatgggtgctgcttttgattaatagcgcatttatagtgatttggcttatatttttcattgcaggtagatactatgaacgatttgccaaatggtcacattataatcatacaccacgtgaaattcgagcgattaaattatttttaagtacgttaaatttagagattatgagctatatgtctatcttcacagtattagaaatttggcaaatacaacaccatcatcaattcaatttactatggtttaatatgatatttatcattatcattggtttgacgcttgtcatattttgtttacttcctacaattcataaaatgagagattctcaataaaaatataaactgtcatgatgcagttttgaagcggattcctgagattattataaataatatctagtatttataattaaaatgatatattatttattatagttaaatattgtgtatattttgtgaactttttgtaaaaattcgattgcctgtcacatataggagtgttacattttaaatatgtgatcatcgcaaaatataagttgaaatagggtgtagattaatcaggatgataaatattttatataaagagagggagtcattatgacactacttactgtaaatccattcgataatgttggattatcagccttagttgcagcagtacctattattttatttttattatgcttaaccgtttttaaaatgaaaggcatttatgcagcattgacaactttggttgttacattggttgtggctttatttgtatttgaattaccagcgcgtgtatcagcaggtgcgattacagaaggcgttgttgccggtattttcccaataggatatatcgttttaatggcagtttggttatataaagtttctattaaaacagggcaattttctattattcaagatagtattgcaagcatttcagaagaccaacgtatccaactattattaattggattttgtttcaacgcatttctagaaggtgcagcaggttttggtgtaccgattgcaatttgtgcagtgttattgattcaacttggatttgaaccattaaaagcagcgatgttatgtttaattgctaatggtgcggcgggtgcctttggtgcaattggtttaccagttagtattattgatacgtttaacttaagtggaggcgttacaacattagatgttgcgagatactcagcattaacacttccaattttaaactttattattccatttgttttagtattcattgtagatggtatgaaaggtattaaagaaattttacctgtcattttaacagtgagtggtacatatactggattacaattattattaacaatattccatggtccagaactagcagacattatcccatcactagcaacaatggtggtgttagcatttgtttgtcgtaaatttaaaccgaaaaacattttcagattggaagcgtctgaacataaaattcaaaaacgaacgcctaaagaaattgtctttgcttggagtccgttcgtcattttaactgcctttgtattagtatggagtgcaccattcttcaaaaaattattccaacctggaggtgcacttgaaagtctagtaataaaattgccaattccaaatactgtgagtgatttatcgcctaaaggaattgcgttgcgtctcgatttaattggtgcaactgggacagcgattttattaacagtaattattacaattttaattacgaagttaaaatggaaaagtgcaggtgctttattggtcgaagcaattaaagaattatggttaccgatccttacaatttcagctatcctagctattgctaaagttatgacatacggtggtttgactgtagcaattggacaaggtattgctaaagcgggagcaattttcccattattctctccagtattaggttggattggtgtgtttatgactggttcagttgtaaataacaatactttattcgcacctattcaagcgacagtggcacaacaaattttaacaagcggttcattacttgtggcagctaacactgcaggtggtgtagcagcgaaacttatttcaccacaatcaattgccattgcgactgcagctgttaaaaaagttggtgaagagtctgcattattaaaaatgacgttaaaatacagtattatatttgttgcctttatttgtgtttggacgtttatactaacgttaatattctaaatataaataatgttgtcacttggattcaaatgacattttaaatctaattattcatgaatcgaactagtacgaaatgcattgagcatcttgtctagttcgattttttaatgtctaaaaatgtcgtatatgtaattagagtagaaagtgttgaggcgcttcagaagttgtttagaaaagtaagtaaaataaaaaatgcactgagcaacaaaagatgttactcgtgcatttagatgattcttatcatttcaaataagaaagtgttaatcaacgtatataagttaaaattggtttggataaaatgatatctatcgttgtgtattgtttgtttttatagttcgcgacgacgtccagctaataacgctgcacctaacgctaatgataatccaccaaatacagttgtaccgatgaatggattttcttcaccagtttctggtaatgcttgagctttgttagcatctgcatgatttgctggttgcttcttatcaacaacaagttcttgaccaggtttgatcatgtttttatcagctaatttgttatctgcagcaattttgtcagcagtagtgccgtttgcttttgcaatgtcatttactgtatcaccaggtttaacgacatgtactccgttgccgtcttctttaccaggcttgttgccatcttctttgccaggtttgttgccgtcttctttaccaggcttgttgccgtcttctttaccaggcttgttgccgtcttctttaccaggcttgttgccgtcttctttaccaggtttgttgttgtcttctttgccaggtttgttgccgtcttctttaccaggcttgttgccgtcttctttgccaggcttgttgttgtcttctttaccaggcttgttgttgtcttctttaccaggtttgttgccgtcttctttaccaggtttgttattgtcttcctcttttggtgcttgagcatcgtttagctttttagcttctgctaaaatttctttgctcactgaaggatcgtctttaaggctttggatgaagccgttacgttgttcttcagttaagttaggtaaatgtaaaatttcatagaaagcattttgttgttctttgttgaatttgttgtcagcttttggtgcttgtgcatcatttagctttttagcttctgctaaaaggttagcgctttggcttgggtcatcttttaagctttggatgaaaccattgcgttgttcttcatttaagttaggtaaatgtaagatttcatagaaagcattttgttgttctttgttgaatgtgttatccgctttcggtgcttgagattcatttaactttttagcttctgacaataggttagcactttgacttggatcatcttttaagctttggatgaaaccattgcgttgttcttcgttcaagttaggcatgttcaagatttcatagaaagcattttgttgttctttgttgaaattgttgtcagctttcggtgcttgagattcgtttaattttttagcttcacctaaaacgttagtgctttggcttggatcgtctttaagactttgaatgaaaccattgcgttgctcttcatttaagttaggcatgttcaaaatttcatagaaggcgctttgttgatctttgttgaagttattttgttgcgcatcagcttttggagcttgagagtcattaagtttttgagcttcacctaaaacgttagcactttggcttggatcatctttaaggctttggataaaaccattgcgttgatcagcatttaagttaggcatatttaacacttgataaaaagcattttgttgagcttcatcgtgttgcgcagcatttgcagcaggtgttacgccaccagatataagtaatgtacctaaagttacagatgcaatacctacacctagtttacgaattgaataaatgtttttctttttcaaattaataccccctgtatgtatttgtaaagtcatcataatataacgaattatgtattgcaatgctaaaatctatatttataattaaatttaaatgtaagttttacaacttataaaataaatgttttgctcaaagatttattcaggaagtaaaaggcttaaaaccgcaaaatcacgctatttcgattaataaaaacagataaaatatagagatattttttataatgaaagcgttttaatgtatataagttaaaaaatatttttaagaataaagtggggctttgaatgtgctgaggtttaatttcggaaatggttttaagagatatagaaaatagaaagttgttcataatgtgctgaggttttattaaaaaatagaaaacacaagtgcactttagaatacagcacacttgcgtaatagagatattattcaaaaacaagatgtaaatgatctttatctgctaataattgattcacttgagctaataattgttcagcatggtcttgctgcgcgtcattcatatgaattaaaatttttctttcatcttcagttgagcgttcttttattagatagccttgcttttttaaattattgagagctctaacagtttgagggtatttatggtggattgtttcaattaaatctttaagaagaacgatgtttttattttgagaagtgataatagctagaattgtgaattctacaaaacttaatgttagatgctttttgataatattcttgaaatacattgtatacatcatcaagtttagaaattctttactatcttttggtatcatctgtgattcactttgatctgcaaggttaaattgtttaatgatgtgatcaaacaatgtaacacgttctgcaattttctctcgttgttcttcagatattgaaatgtaagtattacgctcatcaattttacttcgaactttactaatatatgaatgtttcacaagtacttttatatgctgtactaaatccgattgtttataacataaatctgaaacaatcttcttaaatggaagtgtgttttcttgctgatgaaataaataagtcagtaatataaattcttttatagtcatatcggcttcaggcttgacttttttcttaaaacgaaacatatatgcttcaatgattataaaatctctaattttgtcatggttattatatttcattgttttatctccttgtatatgcactttattttaatataacacaatataataagaaaaataatccataatttacaattaaaaataatatgatatttttattaaaatttgtgtttttgaataaatgacattatcaaacactatatttaaataagaaatagttatcgatatttgaaaaatcgaagaatattgattgatattatagaatatgagtcggtgttatttgtatataaagtattaatatgtaattaagaaagtcgacgcttgttaacaataacgacaactatatgtataaaaaaacctcgcaacggttagttagcttaaacattttgctaacgttgttgtgaggtcattttgttttaataatatcgttataactttttcacggttaataataagtatatgaagaatggggcaccaaaagcagcaataaatacacctgctggcacttctttaggtaagaataaggtacgcccaattaagtctgcaataacaattgatatggcaccaatcattgctgacattagtaactttttagcataacttccgcgaacgattgttttcgcgatatgtggtgcgattaaaccgacaaacccaatgttacctactaaactgattgccatagatacgagtatagtagaagtgattaattggattagtttcatacgttgtacatgtaagcctaagccaatcgctacagggtcatcaagtatagatattttcatttttggtataacaagaaataacaacggcacaacagctaaaataaccatacccaaaatgattgtatctttaaacgtagcaccgtaaagacttccgactagccatgtataagctttggcagcagataattgcttcgttgtaatgagtaatccttggacaagcgcaataaacaatgtttgcatcgaaataccgatgattatgagtgttgtcgggcgtatttgtcctttcgtttgaaacactaatagtatcatcattgcaactgcgccacctaatactgcaaatagtggaagtaaatgtatcgttaaatggctgaaaaatgcaataaagacaacagcacttaagctagcaccacctgtgattccgataatatctggtgaggcaattggatttttcaatacattttgtaacattaaaccactcatccctagtgcggcaccagctaatatcgcaagtgtaatgcgaggtaagcgtaatacttctaaagtgaattgatctatactgtcatttggatttataaagtacatcagtacgcgttgtaatggtataaagcttgaaccaatcatcatacttaccactgaaacgatggctaaaaagattaacgcgaagatgagatggtaattgtcttttttattaatcttttcggtcataagcgttgacgtcctttcttcataatatagattaagacaatagcgccaatgacagcggtaacgacaccgataggcaactctagtggcttaattattatacgagcaacaatgtctgaaatgatcattaggattgctccagctaatgcagtaaaaggaattaaatacttatagtttggtggtaataatcgtttgctaatattcggtacgataagacccacaaagacgattgatccagctacggctaccgaaataccggctaacatactgataagcataataatcatccatttgattaattttatgttttgaccgaggccggttgcaatgtcgtcacttgtcatcaagatgttgatgtgtgcagccatgctaaatgcaattaaaataagtatcaatacaagcggaataacccatgggatatcccaaatgttacgtaatgaaacggagccactcaaccaaaataataggccttgtaagtctgtttcgttcataataagtatgccttgagtaaaggctgtaaatagcatcgcaatcgcagcacctgccaaaatgacacgatgaggtgaaaatagggtttgtctaaacatacctagtgcaacgactaagactgtaacaacaatagcccccaaaaatgcgatgacaacaatcattttaaaagattgaatttggataaatgtaatactaaagatgacaaaaaatactgcgcctgcattgacaccgaaaagccctggtgatgctattgggtttcgtgtaagtgcttgcatcaacaaacctgagacagcaagggcagcaccagtcaataacgcaatgattgttctcgacgcccgtgcaccagtgacaacatcatgtaaatcgttttcactatcaaagttgaataacgcctgtatcaccgtacctggtgacacaagcgtatttccaatcattaaacttaagatagctactattgcaagacataaaccagcaataacgatttggtattttggtttaagtagcatcgtaaaactccttaattattttgattgtttttcaatatttaacttttcatataaatcgtcaataagttttaatgatgatttatatccgccagctaagttccaagtgatttcatctaaatcatcagatacttggttgtttttaactgcgtctaaatttttccactctttacttgaagtccattcgctttcagtctttttaactaatgcagcatctttcgcatttggatctgattttactacaaaaatatgatcagcgttcattaatggaatgctttctttagatgtaagttggataatatctttaccattatcaacttgtttttgtaagtctttattacgtttgaatcctaaatcatttaagatttcaccagcatatccaccagcataaattcttgtatgatcagcacggaagttaacaactgaagcttgcaatggccatgcatctttatactttgcttttgcatctttttggaatgcagctactttatcatcgtactttttaagtaaatcttcagcttctttttctttccctaaagctttccccattaacttagttgtatctttgaatttgaaaactgtatcagtagaaactgttggtgcgattttagataattgatcgtaaactttttcatttctaacttttgacgcgacaattaagtccggttttaatttagagatttcctctaagttaggtgcaggttcttgacctacaatcttagtatcttttaaatcattttttatgtattcgaatttcggtttttgtgtccatgattctacagcacctacaggtttaacacctaaagatacagcgacgtcagtggcaccttgatatagcgtaacaacacgctttggtttccctttaatttcagttgtacccattgcatgtttaattgaagttgtttccttatctttgttatcagatgattgtttatttgaattcccactacatcctgctaaaacaagtaggaaagcaagcgtaacaacaagcattttaattactttattcattgactaattagcctccttcgtgatgtatgacaatgagaatcattatcacggtttagtatgaattaaattttttcctaagtcaataaaatatttatgatttacatgcaacttataattatttgacatataaatgcataaaaaatataatcctaattacttgatagtgagaatcattatcaattaggtaacacacaatattatagaattttaaatttgaggaggaagcgcttttgattgaaaaaagtcaagtatgtcacgattcattgttagattctgtagggcaaacacctatggttcaacttcatcaactatttccgaaacatgaagtgtttgcaaagttagagtatatgaatcctggaggcagcatgaaagatcgacctgccaagtacatcattgaacatggtattaaacatggtttaatcactgagaatacacatttaattgaaagtacttctggtaatttaggcattgcgttggcaatgatagctaaaatcaagggattaaaactcacgtgtgttgttgatcctaaaatatcaccaacaaatttgaaaattattaaaagttatggtgccaatgtagaaatggttgaagaacctgatgcacatgggggttatttaatgactcgtattgcaaaggtgcaagaactgttagccactattgacgatgcatattggattaatcaatatgcgaatgagttaaattggcaatcccattatcatggtgcaggcacagagattgttgaaacaattaagcaacctatagattattttgtcgcgccagtcagcacgacaggtagcattatgggtatgagtagaaaaataaaagaagtgcatccaaacgcacaaattgttgctgttgatgcgaaagggtcagtcatttttggtgacaaacctattaatagagaattacctggtatcggtgctagtcgtgtacccgaaatattgaatagatcagaaattaatcaagtgatccatgtagatgattatcaatctgctttgggctgtcgaaaactgattgattatgaaggcatatttgctggaggttcaacaggttcgattattgcagcgattgagcagttgataacgtcaattgaagaaggtgcaacaattgtcacgattttaccagatcgaggcgatcgttacttagatttagtttattcagatacatggttagaaaaaatgaaatcaagacaaggagttaaatcagaatgaatagagagatgttgtatttaaatagatcagatattgaacaagcgggaggaaatcattcacaagtttatgtggacgcattaacagaggcattaacagcgcatgcgcacaatgattttgtacaaccgcttaagccgtatttaagacaggatcctgaaaatggacacatcgcagatcgaattattgcaatgccaagtcatatcggtggtgaacacgcaatttcaggtattaagtggataggtagtaagcacgacaatccatcgaaacgtaatatggagcgtgcaagtggtgttattattttgaatgatccagaaacgaattatccaattgcagttatggaagcaagtttgattagtagtatgcgtactgcagcagtttcagtgattgcagctaagcatttggctaaaaaaggatttaaagatttaacaatcattggttgcgggctaatcggagacaagcaattacaaagtatgttagagcaattcgatcatattgaacgcgtgtttgtttacgatcaattctctgaagcatgtgcacgctttgttgatagatggcaacaacagcgtccggaaattaattttattgcgacagaaaatgctaaagaagcagtatcaaatggtgaagtagtcattacatgtaccgtaacggatcaaccatacattgaatatgattggttacaaaagggtgcatttattagcaacatttctatcatggatgtgcataaagaagtctttattaaagctgacaaagtcgtagtagatgactggtcacaatgtaatcgagaaaagaaaactattaaccaattagtgttagaaggtaaattcagcaaagaagcacttcatgctgaactaggacaacttgtgacaggtgacataccaggacgtgaagacgatgatgaaatcatattacttaatccgatgggtatggctatcgaagatatttcaagtgcttactttatttatcaacaggcacaacaacaaaatattgggacaacattgaacctatattaagaatgcgaggtgtctgaacattgcagaatcatacagcagtcaatacagcacaaacgataatattaagggatttagttgatgcattattatttgaagatatagccggtattgtatcgaatagtgagattactaaagaaaatggacaaaccattttgatatacaaacgtgaaacacaacaaataaagatacctgtttattttagtgctttaaatatgtttcgttatgaaagttcacaaccaattacgatagaaagaaggacgtctaaacaaccactaactgcaactgaattttggcaaacaatcgctaatatgaattgtgatttaagtcatgaatgtgaagtggctcgcgttgaagaaggactgactactgctgccacacagcttgctaaacaattatcagaattagatttagcgtcacatccttttgtgatgtcagagcagtttgcaagtttaaaagatcgtccatttcatccattagctaaagaaaaaagaggattaagagaagcggattatcaagtgtatcaagctgaattaaatcaatcatttcctttaatggttgcagcagttaaaaagacacatatgattcatggcgatactgcaaatatcgatgaattagaatcattgacagcacctataaaagaacaagcgacagatatgttaaatgatcaagcgttatcaatagatgactatgtactatttccggtacatccttggcaatatcagcatattctgccgaacgtctttgcgaaagagattagtgaaaagttggttgtactattaccgttaaaatttggagattatctgtcatcttcaagtatgcgttcattaattgatattggcgcaccgtataaccatgtcaaagtaccatttgcaatgcagtcattaggcgcattaagactaacgcctacgcgttacatgaaaaacggagaacaagcagaacaattattacgtcagcttatagaaaaagatgaagcactagctaagtatgtcatggtttgtgatgaaacagcttggtggtcatatatgggtcaagataatgatattttcaaagatcaattaggccatttaactgttcagctaagaaaatatcccgaagtgctagccaaaaatgatacgcaacagctagtttcaatggcagcactcgcggcaaatgatcgcaccttatatcaaatgatttgtggaaaagataatatttctaaaaatgatgttatgacgttatttgaagatatcgcacaagtctttttaaaggtaacactatcatttatgcaatacggcgcattacctgagttgcatggtcaaaatatattgttgtcatttgaagatggacgtgtacaaaaatgcgtgttacgtgatcatgatactgtcagaatttataaaccatggctaacagcacatcagctttcattgccgaagtatgtcgtcagagaagatacacctaatacgctaattaatgaagatttggaaacattctttgcttattttcaaacattagctgtatcggtaaatctatatgccattattgatgcaattcaagatttatttggtgtaagtgagcatgaacttatgtcgttgttaaaacaaattttaaaaaatgaagtggcaactatttcttgggttacaactgatcagctagctgtcagacacattttatttgataaacagacgtggccatttaaacaaattttattaccattgctatatcaacgtgatagtggtggaggtagtatgccttcaggtttaactaccgtaccaaatccaatggtgacatatgattaatcagtctatatggcgcagtaactttcgcattttatggctcagtcagtttatagcgattgctggactgacagtacttgtgccattattgccaatttatatggcatcactacaaaatctatcagtcgtagaaatacagttgtggagtggtatagcgattgctgctccagctgtaacgacgatgatagcttcgccgatatgggggaagctaggtgataagatcagtcgaaaatggatggtgttaagagcgttacttggtttggcggtatgtttatttttaatggcattgtgtactacaccattacagtttgtacttgtgaggttattgcagggactatttggtggtgttgttgatgcatcaagtgcgtttgcgagtgcagaggcgccagctgaagatcgtggaaaggtattaggaagactgcaaagttcagtcagcgcagggtctcttgtggggccattaattggcggtgttacagcttcgatattaggttttagtgcgttactgatgagtattgccgttattacttttattgtctgtattttcggtgcattaaaattgattgaaacgacacatatgccaaaatcacaaacaccaaatattaataaaggtattcgccgttcatttcaatgtctattatgcacacaacaaacgtgtcgatttattatcgttggcgttttagcaaactttgctatgtatggcatgctaactgcattatcaccacttgcttcatcagtgaatcatacagcgatagatgaccgtagtgtgattggatttttacagtccgcattttggacggcttcgatattaagcgcgcctttatggggtcgctttaatgataaatcatatgttaaatcagtatatatatttgccacgattgcatgtggttgtagtgcgatactgcaaggtttagcgacgaatatagagtttttaatggctgcaagaatacttcaaggattaacatatagcgcattgattcaaagtgtcatgtttgttgttgtaaatgcttgtcatcagcaacttaaaggcacatttgttggaacgacgaacagtatgttagttattggtcaaattattggtagtcttagtggcgctgccattacaagttatactacaccagctactacgtttatcgttatgggcatagtatttgctgtaagtagtttatttttaatttgttcaaccatcactaatcaaatcaacgatcacacattaatgaaattatgggagttgaaacaaaaaagtgcaaaataaagaattaatacaacatgcagcgtatgcggctatcgaacgtattttaaatgaatattttagagaagaaaatttatatcaagtgccacctcaaaatcatcaatggtctatacaattgtcagatctcgaaactttaacaggtcaattcgcttattggtctgcgatggggcatcatatgtatcatccagaggtatggctaattgatggaaaaattaaaaaattaacaacttataaagaagccattgcgcgtattttgcaacatatggctcaaagtgcagataatcaaacggcagtgcaacaacatatggcgcaaattatgtctgacatcgataatagcattcatcgcacggcgcgttatttgcaaagtaacacaatagactacgcagaggatcgctatatcgtttcagaacaatctttatacttaggtcatccatttcatccgactcctaagagtgcaagtgggttttcagaagcagatttagagaaatatgcacccgaatgtcatacgtcattccaattgcattatttagctgtgcatcaagatgttctgctcacgcgctatgtagaaggtaaagaagatcaggttgagaaagtgttgtatcaattagcagatatagacatatcagagatacctaaagattttattttattaccaatacatccttatcaaatcaatgtgttgcgacagcatccacagtatatgcaatatagtgaacaaggtttaataaaagaccttggcgtttccggtgattcagtttacccgacgtcttcggttagaactgtattttcaaaagcattaaacatttatttaaaattaccgatacacgttaaaattactaattttatacgtacgaatgatcttgaacaaattgaacggacaatcgatgccgcacaagttatcgcatcagtcaaagatgaggttgaaacaccccattttaaattgatgtttgaagaaggctatcgtgcattgttaccgaatccattaggacaaacagttgaacctgaaatggatttattaacaaatagtgccatgattgttcgtgaagggataccgaattaccatgctgataaagatattcatgtattggcgtcattatttgaaacgatgcctgattcaccgacctctaagttatcacaagtgattgagcaaagtggtttagcgccagaagcatggcttgaatgttatttggatcgtacattattgccgatattaaagctgtttagtaacacaggcattagtctagaagcacatgtacaaaatacattaattgaattaaaagatagcatacccgacgtatgctttgtcagagatcttgaaggcatttgtctatctagaacgattgctactgaaaaacaacttgtgccaaatgttgtggcagcatctagccctgttgtatatgcacatgatgaagcgtggcatcgtcttaaatattatgttgtagtaaatcacttaggacatttagtatcaaccattggtaaagcgactagaaatgaagttgtgttatggcaacttgtagcgcatcgtcttatgacttggaaaaaagaatacgcgaataacgcagtatttgttgactgtgtagaagatttatatcaaacgccgaccattgcggctaaagcgaatttgatgagtaaattgaatgattgtggtgcaaaccctatttatacacatataccaaatccaatttgtcataacaaggaggtatcgtattgtgaatcaaacaattcttaatcgtgtaaagactagagtgatgcatcaactggtatcctcacttatttatgagaatatcgttgtttataagacgtcatatcaagacggtgtcggtcattttacaatagaaggacaagattcagagtatcgttttactgctgaaaagacacatagctttgatcgtatacgtatcacatcaccaattgagcgtgtcgtaggagatgaggcagatacaacaacagactatacacaattactgagagaggttgtatttacatttcctaaaaatgatgaaaagttagaacaatttattgtcgagttattacagacagaactaaaagatacacaaagtatgcagtatcgagaatcaaccccaccagcaacacctgagacatttaacgactatgaattttatgcgatggaaggtcatcagtatcatccaagttacaaatcacgtttaggatttacgttgagtgataatttgaaatttggtcctgactttgtaccaaacgttaaactgcaatggttagctatcgacaaagataaagtagaaacgacggtatcaagaaatgttgtagttaacgaaatgttacgtcaacaagttggcgataagacttatgaacattttgtacagcaaattgaagcgtctggtaaacatgtaaatgatgttgagatgatacctgtacacccatggcagtttgaacatgtcatccaagttgatttggctgaagaaaggcttaatggcacagtactatggttaggggaaagtgatgagctatatcaccctcaacaatcgattcgtacgatgtcgccaatagacacgacaaaatattatttaaaggtaccaataagtataacgaatacttcaacgaaacgagtgttggcgcctcatacaattgaaaatgcagcgcaaattacggattggttaaagcagatacagcaacaagatacgtatttaaaagatgaattaaagacagcttttctaggggaagtcttaggacagtcttatttaaatacacaactttcgccttataaacaaactcaagtttatggtgcgttaggtgttatatggcgtgaaaatatatatcatatgttaatcgatgaagaggatgcgataccatttaatgcactttatgcgagtgataaggatggtgtaccattcattgaaaattggattaaacaatatggttctgaagcttggacaaagcaatttttagctgtagcgattcgtccaatgattcatatgctttattatcacggtattgcctttgaatcgcatgcacaaaatatgatgcttattcatgaaaatggttggcctacacgtattgccttaaaagatttccatgatggtgttcgttttaagcgtgagcatttaagtgaagctgcttcacacctgacattaaagccaatgccagaagcacataaaaaagttaatagtaattcatttattgaaacagatgacgaacgtttagtacgcgactttttacatgatgcatttttctttattaatatcgccgaaatcatcttatttattgaaaagcaatatgatatcgatgagaagctgcaatggaaatgggttaaaggcatcatcgaggcgtatcaagaagcatttccagagttgaataactatcaacatttcgatttgtttgaacctacgattcaagttgaaaagttaacgacacgtcgattattaagtgactccgagttaagaattcatcatgttacaaatccattaggtgtaggaggtattactgatgcaacaactatctctgaaacatagattaaacaatggtgattcagtttatggcatttttaattctataccggacccattaatgatagaggttatcgcagcaagcgggtatgactttgttgtgattgatacagaacacgtggcgattaatgatgagacactagcgcatttaattcgtgcagctgaagcagcgcatattataccaattgtacgtgtcactgcagtgatagatagagatatcattaaagtgttggatatgggtgcgagaggtattattgtgccacacgttaaagatcgtgagacagttgagcatattgtgaaattaagtcgttattacccgcaaggattaagaagtttgaatggtggtcgcatggcaagatttggacgtacaccattacttgatgcaatggagatggctaatgagcatattatggtgattgccatgatagaagatgttgaaggggttatggccattgacgatatagcacaagtcgaaggtttagacatgatagtcgaaggtgccgcagatttatcccagtcacttggcataccatggcaaacgcgtgatgatcaagtaacatcacatgttcaacatatttttgaagttgtgaatgcacatggtaaacatttttgtgcattaccacgtgaagatgaagatattgcaaaatggcaggcacaaggtgtacaaacatttattttaggtgatgatcgtggaaaaatatatcgccatttaagtgcatctctagcgacgtctaaacagaagggggatgaagactaatgcgtatagttcaacccgttattgaacaattaaaagcacaatctcatccagtttgtcattatatctatgatttagttggactggaacatcatttgcaacatattacatcgtcattgcctagtaattgtcagatgtactatgcaatgaaagcaaatagtgaacgaacaatcctagatacaattagtcagtatgttgaaggattcgaagttgcatctcaaggtgaaatagcaaaaggtcttgcttttaaaccagcaaatcatattatttttggtggccctggtaagacagacgaggaactaagatatgcagtaagtgaaggtgttcagcgtattcatgttgaaagtatgcatgaattacaacggctaaatgccatcttagaagatgaagataagacacaacacattttattgcgtgttaatttagcaggaccatttcccaatgcaacgttgcatatggcaggacgcccaacacaatttggtatttctgaagacgaagttgatgatgtcattgaagctgcgctagcaatgccaaatattcatttagatggatttcattttcattctatttctaacaatttagactcgaatttacatgtcgatgtagtgacactttattttaaaaaagcaaaggcatggtctgaaaaacatcaatttcctctcaaacatatcaatcttggtggtggcataggcgttaactatgcagatttaactagccaatttgagtgggataattttgtagaaaattttaaaacacttatcgttgagcaagaaatggaagatgtgacattgaactttgaatgtgggcgctttattgtggcacatattggttactatgtgacagaagtgctagatattaagaaagtacatggtgcttggtatgccattttaagaggaggtacgcaacaatttagactgccggtatcttggcagcataaccatccttttgacatttatcgctataaggacaatccatattcatttgaaaaagtttcaatttcgaggcaggacacaacgttagtcggtcaattatgtacaccgaaagatgtctttgctagagaagtacagatagatgcaatcagtacaggcgacgttattgttttcaaatatgcaggtgcatacggatggtctatttcacatcacgatttcttaagccatccacatcctgaatttatttatttaacgcaaacaaaggaggatgaataactattgaatcatattcatgaacatttaaaattggtaccagtagataagattgatcttcacgaaacattcgaacctttaagattggaaaagacgaaaagtagtattgaagcagatgattttatacgtcatcctattttagtgacagcgatgcaacatggtagatatatggttatagatggtgtgcatcggtatacaagtttgaaagcgttaggatgtaagaaagttccagtgcaagaaatccatgaaacacaatattcaattagtacatggcaacataaagttccatttggtgtgtggtgggaaacgttacaacaagaacatcgcttgccatggactactgagacaagacaagaagcgccatttattacgatgtgtcatggtgatacagaacaatatttgtatacaaaagatttaggcgaagcacattttcaagtatgggaaaaggttgtcgcaagttatagtggttgttgttctgtagagagaattgcacaaggtacatatccttgtctttctcaacaagatgtactcatgaagtatcagccattgagttataaggaaattgaagcagttgttcataaaggggaaactttgccagcaggtgtgacacgctttaatatttcaggacgatgtcttaatcttcaagtaccactggcattacttaaacaagatgatgatgttgaacaactgcgcaattggaagcagtttttagcagataagtttgccaatatgagatgctatactgaaaaagtatacttggtggagcaatagttttactgtgatgttgagagaaatatgatgatttagcgtattgatagcgaaaatataataaacaatatagtgtggagaacttttgatattttataaatattaaagttctctatttttgtattttgcatataaaaattaaataaaataaggtatattaaggtaaagtataaattttaaataaatggggaatgagtatgaatatggatttaattataggaagaatcgctatttggataggcatcgcagtgcaaatgtattataacgtcgtcattgttagcatgacaacctttatcatttttataaatgctgaaggagcaagccctgaaatagctgttttaatagcattagtaatcattcttatcttaactttaccacctatcctaaccgcgattaacttagagaataaaatggaagtaaaaggtacgctttttattgtttatgcgattgtggcattttgtatgtttaattacctttcatcaatgttatgggtggtttgcggcatttttcttatttggactaaatattcaaaagatgggtcaacaggtaagaatgaaaataaaaaagttgatattgaaagtacagagaatcaatttgaatctaaagataaaattactaaagaataaagtgaatatttgtggtagtgtataaagtttaaataaatggggaatgagcatgaggaaaaatatagaattgatattaatatggatgggtatatatattcaaatagcatacatggctattatagctttgctcatatatatatttacattattttttggatcattttttggatttttatttttgttaacaggtaatgaaattggagatttattaaaaacacccacttcatttatgatatttgctacatgtctaattatattttcagtcttacctgttactgtactagcatttgacttatctaaaagaagaattttaaaaggtatcatattagttgtatatgcgattattgctgcgttattatacaactttgtatctgcaatactttggtttattgtagccatttctctttttattagaaaaaaatctttatctgcagaaaatactgttgctgttcaaagtcacaaaggagcttctaaacaagaaatacgttataaacttgtgtacaagtctgtctcgataaaacatagtgatgattcaattaaagtagcacatacagtgggaaataaaaaactaattgatgacaaaacaattgatattcaccttgattcaagtgaaatattaaaaaagattagtactgacgcaaatcaagcatcacataaagacacgtgtaaaaaggaacttgatagtcaagacatgatagaacatcctgagtttaaaaatcccacgactaaaaacctagaaggattaaacgaagaagtacataaagatgaagctacaactaaagttgacagtgataatacggaaccgccgattgaatcaaaagaccatgtctcgaaaaaagattgataacaaactaatcgagagacttaaaaaataatattcaacataagcacttttaaaacgacatttaaacgcattgccaatcactaaaggtagtgcgtttaactataccttaaatatctgaatattttgttaaatggagttacctttgttgtactattcaaatgaagaggagtaaaatgtaattaaaggaaagtaatttgaggagtgatctttatgacaaacaacaaagtagcattagtaactggcggagcacaagggattggttttaaaattgcagaacgtttagtggaagatggtttcaaagtagcagttgttgatttcaatgaagaaggggcaaaagcagctgcacttaaattatcaagtgatggtacaaaagctattgctatcaaagcagacgtatcaaaccgtgatgatgtatttaatgcagtaagacaaactgcagcgcaatttggcgatttccatgttatggttaacaatgccggccttggaccaacaacaccaatcgatacaattactgaagaacagtttaaaacagtatatggcgtgaacgtagcaggtgtgctatggggtattcaagccgcacatgaacaatttaaaaaattcaatcatggcggtaaaattatcaatgcaacatctcaagcaggcgttgagggtaacccaggcttgtctttatattgcagtacaaaattcgcagtgcgaggtttaacacaagtagccgcacaagatttagcgtctgaaggtattactgtgaatgcattcgcacctggtatcgttcaaacaccaatgatggaaagtatcgcagtggcaacagccgaagaagcaggtaaacctgaagcatggggctgggaacaatttacaagtcagattgctttgggcagagtttctcaaccagaagatgtttcaaatgtagtgagcttcttagctggtaaagactctgattacattactggacaaacaattattgtagatggtggtatgagattccgttaataatcatccactaatgataaataaatccttattgttaagtttaatcacttagcagtaaggattttttagtgcacttagaagggattgtattggtagaaaattaataacagaagttcctaaatgagttatgatgtcactgtctaatgcatcagttgaaagcattactagtattaacacactcaagatattataaaatatcacaaaaaccccactatctaatttatctcaataaaaattcacaaagttatctcattttatttttataaataaaaaatatcgataaaaagcttacaatactttatgtttttatgatatatttttaatgtataaaagaggtggaagatttggaaagagttttgataactggtggggctggttttattgggtcgcatttagtagatgatttacaacaagattatgatgtttatgttctagataactatagaacaggtaaacgagaaaatattaaaagtttggctgacgatcatgtgtttgaattagatattcgtgaatatgatgcagttgaacaaatcatgaagacatatcaatttgattatgttattcatttagcagcattagttagtgttgctgagtcggttgagaaacctatcttatctcaggaaataaacgtcgtagcaacattaagattgttagaaatcattaaaaaatataatagtcgtataaaacgttttatctttgcttcgtcagcagctgtttatggtgatcttcccgatttacctaaaaatgatcaatcattaatcttaccattatcaccatatgcaatagataaatattacggcgaacggacgacattaaattattgctcgttatataacataccaacagcggttgttaaattttttaatgtatttgggccaagacaggaccctaagtcacaatattcaggtgtgatttcaaagatgttcgattcatttgagcataacaagccatttacattttttggtgacggactgcaaactagagattttgtatatgtatatgatgttgttcaatctgtacgcttaattatggaacacaaagatgcaattggacacggttataacattggtacaggcacttttactaatttattagaggtttatcgtattattggtgaattatatggaaaatcagtcgagcatgaatttaaagaagcacgaaaaggagatattaagcattcttatgcagatatttctaacttaaaggcattaggatttgttcctaaatatacagtagaaacaggtttaaaggattactttaattttgaggtagataatattgaagaagttacagctaaagaagtggaaatgtcataaaaataacattgaagatgttcatataaataaaaattataattatcaaagaaaattagatgcactcgaagaagtgagaaaaggctattacccaattaaacgtgcgattgacttagtattaagtatcgttttattatgtttaacatttccgattatgttcatattcgccattgctattgtcatagattcgccaggaaatcctatttatagtcaggttagagttgggaagatgggtaaattaattaaaatatacaaattacgttcgatgtgtaaaaacgcagagaaaaatggtgcgcaatgggctgataaagatgatgatcgtataacaaatgtcgggaagtttattcgtaaaacacgcattgatgaattaccacaactaattaatgttgttaaaggggaaatgagttttattggaccacgcccggaacgtccggaatttgtagaattatttagttcagaagtgataggtttcgagcaaagatgtcttgttacaccagggttaacaggacttgcgcaaattcaaggtggatatgacttaacaccgcaacaaaaactgaaatatgacatgaaatatatacataaaggtagtttaatgatggaactatatatatcaattagaacattgatggttgttattacaggggaaggctcaaggtagtcttaatttacttaataagttcaaataaaagttacattttaaagattgtgaccaattgttacagtataacgaggaatcccttgagacagtatcaaatggcattaagaaatatgtgccatcattgatttgcatggctataaatactattcatctgatgagatagctatgttaagaaattgaaagtatagcgttaaaggggtttgtaacagttgaaaattatatattgtattactaaagcagacaatggtggtgcacaaacacatctcattcaactcgccaaccatttttgcgtacaccatgatgtttatgtcattgtaggcaatcatggaccaatgattgaacaactagatgcaagagttaatgtaattattatcgaacatttagtaggtccaattgactttaaacaagatattttagctgtcaaagtgttagcacagttattctcgaaaattaaacctgatgttatccatttacattcttccaaagctggaacggtcggacgaattgcgaagttcatttcgaaatcgaaagacacacgtgtagtttttacagcgcatggatgggcttttacagagggtgttaaaccagctaaaaaatttctatatctagttatcgaaaaattaatgtcacgtattacagatagcattatttgtgtttcagatttcgataaacagttagcgctaaaatatcgatttaatcgattgaaattaaccacaatacataatggtattgcagatgttcccgctgttaagcaaacgctaaaaagccaatcacataacaatattggcgaagtagttggaatgttgcctaataaacaagatttacagattaatgccccgacaaagcatcaatttgttatgattgcaagatttgcttatccaaaattgccacaaaatctaatcgcggcaatagagatattgaaattacataacagtaatcatgcgcattttacatttataggcgatggacctacattaaatgattgtcagcaacaagttgtacaagctgggttagaaaatgatgtcacatttttgggcaatgtcattaatgcgagtcatttattatcacaatacgatacgtttattttaataagtaagcatgaaggtttgccaattagcattatcgaagctatggctacaggtttgcctgttatagccagtcatgttggcggtatttcagaattagtaactgataatggtatatgtatgatgaacaaccaacccgaaactattgccaaagtcctggaaaaatatttaatagacagtgattacatcaaaatgagtaatcaatctagaaaacgttatttagaatgttttactgaggagaaaatgattaaagaagtggaagacgtttataatggaaaatcaacacaatagtaaattactaacattgttacttatcggtttagcggtttttattcagcaatcttcggttattgccggtgtgaatgtttctatagctgactttatcacattactaatattagtttatttactgtttttcgctaaccatttattaaaggcaaatcattttttacagtttttcattattttgtatacatatcgtatgattattacgctttgtttactattttttgatgatttgatatttattacggttaaggaagttcttgcatctacagttaaatatgcatttgtagtcatttatttctatttagggatgatcatctttaagttaggtaatagcaagaaagtgatcgttacctcttatattataagcagtgtgactataggtttattttgtattatagccggtttgaacaagtcccctttactaatgaaattgttatactttgatgaaatacgttcaaaaggattaatgaatgaccctaactatttcgcgatgacacagattatcacattggtacttgcttacaagtatattcataattacatattcaaggttcttgcatgtggcattctgctatggtcattaactacaaccggatctaagactgcgtttatcatattaatcgtcttagccatttatttctttattaaaaagttatttagcagaaatgcggtaagtgttgtgagtatgttagtgattatgctgatattactttgttttaccttttataatatcaactactatttattccaattgagcgatctagatggcttaccatctttagatcgaatggcatcaatttttgaagagggatttgcatcattaaatgatagtgggtctgagcgaagtgttgtatggataaatgccatttcagtaattaaatatacactaggttttggtgtcggattagtggattatgtacatattggctcgcaaattaatggtattttacttgttgcccataatacatatttgcagatttttgcggaatggggcattttattcggtgcattatttatcatatttatgctttatttactgtttgaattatttagatttaacatttctgggaaaaatgtaaccgcaattgttgtaatgttgacgatgctgatttactttttaacagtatcgtttaataactcaagatatgtcgcttttattttaggaattatcgtctttattgttcaatatgaaaagatggaaagggatcgtaatgaagagtgattcactaaaagaaaatattatttatcaagggctataccaattgattaggacgatgacaccactgattacaatacccattatttcacgtgcatttggtcccagtggtgtaggtattgtttcattttctttcaatatcgtgcaatactttttgatgattgcaagtgttggcgttcagttatattttaatagagttatcgcgaagtccgttaacgacaaacggcaattgtctcagcagttttgggatatctttgtcagtaaattatttttagcgttaacagtttttgcgatgtatatggtcgtaattactatatttatagatgattactatcttattttcctactacaaggaatctatataataggtgcagcactcgatatttcatggttttatgctggaactgaaaagtttaaaatacctagccttagtaatattgttgcgtctggtattgtattaagtgtcgttgttatctttgtcaaagatcaatcagatttatcattgtatgtatttactattgctattgtgacggtattaaaccaattacctttgtttatctatttaaaacgatacattagctttgtttcggttaattggatacacgtctggcaattgtttcgttcgtcattagcatacttattaccaaatggacagctcaacttatatactagtatttcttgcgttgttcttggtttagtaggcacataccaacaagttggtatcttttctaacgcatttaatattttaacggtcgcaatcataatgattaatacatttgatcttgtaatgattccgcgtattaccaaaatgtctatccagaaatcacatagtttaactaaaacgttagctaataatatgaatattcaattgatattaacaatacctatggtctttggtttaattgcaattatgccatcattttatttatggttctttggtgaggaattcgcatcaactgtcccattgatgaccattttggcgatacttgtattaatcattcctttaaatatgttgataagcaggcaatatttattaatagtgaataaaataagattatataatgcgtcaattactattggtgcggtaatgaatttagtattatgtcttgttttgatatatttttatggaatttacggtgctgctattgcgcgtttaattacagagtttttcttgctcatttggcgatttattgatattactaaaatcaatgtgaagttgaatgttgtaagtacgattcaatgtgtcattgctgccgttatgatgtttattgtgcttggtgtggtcaatcattatttgccccctacaatgtacgctacgctgctattaattgcgattggtatagtagtttatcttttattaatgatgactatgaaaaatcaatacgtatggcaaatattgaggcatcttcgacataaaacaatttaagtatcggtaacgctatactttagaaatttaagatgaagaagaaaaggcaatttcttattgaaaaatggaagttgtcttttttaattctttttaaaagcgggaaacaaaagcagttaaatgcctttttgcattcaatgttaaatattatatcaatttcgaatatttaaattttatataattggatataacaaataaataataattattgcaaaacacacccgaaattaattattataaaagtatattcataaaaggaggaatatacttatggcatttaaattaccaaatttaccatatgcatatgatgcattggaaccatatatagatcaaagaacaatggagtttcatcacgacaaacatcacaatacgtacgtgacgaaattaaacgcaacagttgaaggaacagagttggagcatcaatcactagcggatatgattgctaacttagacaaggtaccggaagcggtgaggatgtcagtccgtaataatggcggtggtcattttaaccattcattattctgggaaatactatcacctaattctgaagaaaaaggtggcgtaatagacgacattaaagcgcagtggggcactttagatgaatttaaaaatgaatttgcaaataaagcaacaacattatttggatcaggttggacttggttagttgttaatgatgaaaaattagaaattgtgacaacgccaaaccaagataatccattaacagaaggcaaaacaccaatcttactatttgatgtttgggagcatgcctactatctgaaatatcaaaataaacgtccagactatatgactgcattttggaatattgttaactaggaaaaaagttgatgaattataccaagcagcaaaataatataacttaatataattgaggtggagcatctacaaggtgtttcacccttttttgtacttaatatctttacttattcgtgtatgtgttatgggatagcacgtaaaagtggcaaaataaaacagtacaatcatatacaatgatgaatactttacttgtgttctctgtgcttgtgaactaaatgtttcgagaagagcgcacatcgaataacaaaattatttagacgacgttcaacaaataaataaacataatacgattaataatagaaaaatcgtgtgattatctgagcgagcctaggacataaatcaatatcctaggctcgctaatgttatattggcattagttgactgaatgaaattgcgcttgtaacaagcttttccatttcttacccactccctaaatagtcatcacaaaatttctcatatttcaataattttaataatccgattgtcttatacgtgtcagtgttaattcagatatttcctgtggaatataccacttattaatcataattggataaggtgtttgtgcgtacaatgtttcaataatcagccaacaatgtgtatcaccatcaaacacgtgactatgatttttgaagtggggcgctttggtaatagacatttttaaatctgattgatatgcattgctataaatcgtttgctcaacgaacgtcttcatgtcgtcttcgttttgtgtattcactttaaatgtgtcaatgacatttaacggtataaaggtaaaacaaaatgcatcagcttgcttagaatgattgtcctttttttgataatagcgttccattgcaatgacggcagaaggatggtttgcaaacaaatgatttgtatattcactttctaaatcaacacgataattaattgatgacatagatacgcaagctagcaatatttgatcaagtggatgcttaaattgatccatacttgaagcgtgttgggcatttgtttgtggaataacaaagtgtcccttccctcttgtactctctacgatgccatcttcggctaacaattttatagcttggcgcaaagtcatacgactgacatcaaagcgcgcacaaagttccttttcagtaggtaatgcatggccactcggatattttcctatttgaatttctttatataacgtattataaatcgttaaaaattttggttgtgtttgcgtcacgtagacaacctccataaagttacttaatcactctcatcatacaataatttttactcgaattggaaaaattataaaaattaaacatagatagactttgaaaattagttttatacaaggttagaagctataactgtaaaatgttcttaatattgtcaaaatgtaatgcttgaaagcgcttttaaaaaatattattatatacatggttagacaaatagacaaatcactatacaaatattgggaggaatattttatgaaatcaacaccacacattaaaccaatgaatgacgtcgaaattgcagaaacggttctattgccaggagatccgttaagagctaagttcattgcagaaacatatttggacgatgtggaacagttcaatacagtgcgaaacatgtttggttttaccggaacatataaaggtaaaaaagtttctgtcatgggttcaggaatgggtatgccatctattggcatttactcttatgaattaattcatacatttggttgtaaaaaattaattcgcgttggttcttgtggcgcgatgcaagaaaacattgatttatatgatgtgattattgcacaaggtgcctctactgattcaaattacgttcaacaatatcaattaccaggtcattttgcgccaattgcttcttatcagttattagaaaaagcagttgaaacagcacgtgacaaaggtgtacgtcatcatgtaggtaatgtgttatcaagtgatattttctataacgcggatacaacagcgagtgaacgttggatgcgtatgggtattttaggtgtagaaatggaatcagctgcattatacatgaatgcaatttacgctggtgtcgaagcattaggtgtgttcacagtgagcgatcatttaattcatgaaacgtcaacaacacctgaggaaagggaacgtgcatttacagatatgattgaaattgcactgtcattggtgtagatgattatgaatgttgaatattctaaaataaagaaagcagtacctattttactattcttatttgtattcagtttggttatagacaactcatttaaattgatttctgtagccattgctgatgacttaaatatctctgtaacgacagtaagttggcaagcgacattagccggtttagtaattggtattggcgctgtagtatacgcttcattatctgatgccattagtatacgcacactatttatttatggcgtgatattaatcattatcggatcaattattggttacattttccaacatcaattcgcattacttttagttggacgtattattcaaactgcaggtttagctgctgcagagacattatatgtgatatatgttgcaaagtatctttctaaagaggaccagaagacttaccttggcttaagtacgagcagttattccttgtcattagttatcggtacattatcaggtggatttatttctacgtatttacactggacaaatatgtttttaattgcgttaatcgtagtatttacgttgccattcctatttaaattattaccaaaagaaaataatacaaataaagctcatttagattttgttggcttaattctagtggcaactatcgctacaacagtcatgctgtttattacgaactttaattggttatatatgattggtgccttaattgcgattatcgtttttgcgctatatattaaaaatgctcaacgtccattagtaaacaaatcatttttccaaaataaacgttatgcttcatttttatttatagtatttgtaatgtatgccatccaattgggttatatttttacgttcccattcataatggaacaaacttatcatcttcaactagacacaacatcactgttattagtaccgggttatattgtagcagtcatcgttggtgcactaagtggtaaaatcggcgaatatcttaattcaaaacaagcgattatcacagcaattattttaatcgcactgagcttgattttacctgcatttgcagtaggtaatcacatttcaatcttcgtcatttctatgatattctttgcaggtagctttgctttaatgtatgcacctttacttaacgaagccattaaaacaatagatcttaatatgacaggtgtggctattggtttttataatttaattattaatgtggcggtatctgtaggtattgcgattgctgcggctctaatcgattttaaagcattaaatttcccaggcaatgatgcattaagttcacatttcggtattattttaattattttaggtttaatgagtattgtcggattagttttattcgtcatcttaaatcgttggacacaatctgaaaaataaatagatataaattcgcgagatatattcgtatttatagtaaaattaaataaagagattatataacacgaggagtagtaagtatgaaatttgagaaatatatagatcacactttattgaagcctgagtcaacacgtacgcaaatcgatcaaatcatcgatgaagcgaaagcatacaattttaaatctgtatgtgtgaatccaacgcatgtaaaatatgcagcagagcgactagctgattcagaggtgctagtttgtacggtaataggattcccattaggtgcgtcgacaactgcaacgaaagcatttgaaacagaagatgcaattcaaaatggtgcagatgaaattgacatggtcatcaacatcggcgcattaaaagatggacgttttgatgatgtgcaacaagacattgaagcagtggttaaagctgcgaaaggtcacacagtaaaagtgattattgagacggtattgttgaaccatgacgaaatcgtaaaagcgagtgaattaacaaaagcggctggtgcggacttcgttaaaacttcaacaggttttgcaggtggcggtgcgactgcagaagacgttaaattaatgaaagatacagtaggtgctgatgtagaagtaaaagcatcaggtggcgtacgtaatttagaagatttcaataaaatggttgaagcaggtgcgacacgtattggtgcgagcgcaggcgttcaaattatgcaaggtttagaagcagattcagattactaatatatataaaatttgggagtgatagctatgacaagaccatttaatcgtgtacatttaatcgtaatggattcagtaggtattggtgaagcgccagacgcagctgattttaaagatgaaggttcacatactttaagacataccttagaaggcttcgatcaaactttaccaaaccttgaaaagttaggtctagggaacatcgataaattaccagtagtaaatgcagttgaacaaccagaagcatactatactaaattgagtgaagcttcagttggtaaagatacaatgactggtcactgggaaattatgggattaaatattatgcagccttttaaagtataccctaatggattccctgaagagttaattcaacaaattgaagaaatgacaggtcgtaaagttgttgctaacaaaccggcatcgggtacgcaaattatcgatgagtggggcgagcaccaaatgaaaactggtgacttaattgtttatacaagtgcagacccagtattgcaaattgctgcacatgaagacattatcccattagaagagttatatgatatttgtgaaaaggttcgtgagttgacaaaagaccctaaatatttaattggtcgtattatcgcacgtccatatgttggtgaaccaggaaactttacacgtacatctaatcgacatgactatgcgttaaaaccatttggtaaaactgtcttagatcatttgaaagacggtggttatgatgtcattgccatcggtaaaattaatgacatttatgatggtgaaggtgtaacagaagcggttcgtacgaagagtaacatggacggtatggatcaattgatgaaaattgttaagaaagatttcacaggtattagcttcttaaacttagtagactttgatgcattatacggtcatcgtcgtgataaaccaggttatgcacaagcaattaaagatttcgatgatcgcttgccagaactgtttagcaacttaaaagaagacgatttagtaattattacagcagaccatggtaatgacccgacagcgccaggtacggaccatacgagagaatatatcccagtaattatgtacagtccgaaatttaaaggtggtcatgcactagaaagtgatactacattcagttctatcggtgcaactatagcggataatttcaacgtaacattaccagagttcggtaaaagttatttaaaggaattaaaatagaataaatttagatattataaaaatagcagtgaagttaactataataatagttttcttcactgctgttttaatataatagagaaacgtaagacggtagtacctcttatttaggagtatcttgattcaatgttaaacaatacgttttcggattgaaccggaaattaaatcgacaattgcgaccattagtactaaaccgattaatataatacctacacggtcccaagaacgtgtttgaatggcaaatatgagtggtgtcccgataccaccagctccaattacccctagtatagaagctgaacgtaagtttagttcaaagcgataaagtatgagtgatagaaaggcaggcataatttgtggtatgactgcaaatacgagtgttttaatcttattcgcaccactggcctttaatgattctacagcactgaaatctagaccttcaatatcttcagctaaaagttttccaagcatacctacggaatggatacctaaagctaatacacctgaaaatgaacctgggccaacagctttgataaatataagtgccattacaatttctgggaagacacgtataacacttaaaataaatttgctaacacctgaaactgggcgtagctttaccatattatttgcacctagaaatgctaatggaatacagataattgcggcgatgaaagtacctacaacggctatcgcaaaggtttcaagtaaaccacgtaataagtcttcgccatctggtatatagatatagctgatatcaggatggaataatccgctgaatatggattttaagatttctaatgatttacttttaagttctaaacttggtacacctgcaaatgcccagatgataatagctaagacgacaattgcaataagccatcttttaatcaattttcgtttgtgtgcttttgtgtgaacattatattttgctatttcctgtgtcatgcgagatgtgccctcactttcgtactgatgtaatcaatgacgacgacgataactaaagtaaataaaataatcgttgctgtttttggatattgaaataaaccaagtgtttgatcataaaacaatccaataccgccagcgccgactaatccaagaacagctgaagcacgtatatttacttcaaatgcatataatacgtatgacataaatgacgatatggcttgtggtacaacaccgaaaacaatccattttattttattagcgccaacagccgtcattgcttccattggacctggatctatcgtttccaatgattcatataataattttccaataatacagatagttaaaataaacaatgctaatatccctggaatttgaccgattccaaatacagccacaaagattgctgctaatagcaaatccggtatagtacgaactatatttaaaataaaacgcgagggtattgaaatccacttttgatgaacgatattgctagcacataataacgcaattggtattgaaacgatgctatctaatactgtacttacgatagccattcgaatggtatctaacattggcgttgtaatttgttgtaaatactcgaaatcaggtggaatcatttgtttgaatagatcacctatttgaggtattcctatcattaaatctccaaaattaaaccccgtataaatgaagctccaaatgataagcacaatgattaacatgaaggtaaaactcgtttttaaagaaacctttttctttaaaagggagtcatactttgtaggtatttctaaaggcatgttagttcactcctagcttttcatcttctttaattgtacgtccatatatttcactaaatacgtcatctgttgcttcagatgcaggaccatcatagacaacctcaccatcacgtaaaccaatgatgcgtgtgccatattcttttgctaagtcaacaaaatgtaaattaattaaaattgtaatgcctaattcttggttgatttttcttaaatcatccataacctgtttcgttgttaatgggtctaatgaagcaactggttcatctgcaagaataatttcggattcttggcatagcgcacgtgcaatagatatacgttgttgttggccacctgataattcatcagagcgttgattatatttatctaagatgttgacccgttctagtgcatccattgctttaattttgtcttcttttggaaataaacctaataccattttccaagtagggtgataacctacacgtccacttagtacatttcgtaatacacttgaccgtttaactaaattaaaatgttggaaaatcatacctatatttcggcgcatttctaataatgctttaccatgggctttagtgattgatttaccttggatgaaaatttcacctgacgtgatatcatgcaaacgatttacagatcttaataacgtggatttcccagcaccagatagtccgacaatgactgcaaattcacctttttcaatatttaagttaatatttttcaagcctacatgaccgttaggatagactttactgacgtttttaaattcgatttgactcatgtttgacacctttctttaataaagaaaagccaaggtaaactgaaatatcatagacattgggtttctgtgtacaaatgatttcaaatgtacagcgacacctttctatatctgtttcagtttagcgcctagcttttcaatattaatctagaatatatctattgatcgaaagcttttaataccaaattcgataatgattcattggttaaataatgattatttcatatctttaactaatttttcgtactctcttacaatgtcgaaatttgaatctttcgtttctgtgtatccttcatgtgaataaacttcgctaataattttgtgaccttcttttgatttagcaatgtctataaaagcttttttcaatttctcttggaaatctttatccatatctggtcttactgaaattgtgtcattcggaatagcttgtgttaattttaaaattcgtgtgtctttaaatacatttggttggtcttttttcacagtattacgtgcatcgttaaatacagccgcagcatctacatctccatttaataatgagataactgcttggtcatgacctttaacattcacaattttcatatctttagttgcattaatacctgcttcgttttttaacatcgcaagtgggaatgtatatccagcagttgatgttacatcttgtaaggcaattttcttaccttttaaatctttcaagcttttaatttttgagtcttttttaacaagaatttctgatttataactatctacaagttctttacttgctgaaccatcttcttttacaccaaaacgttgtgcttgtaataataaatcagctgctttttgatcatgtgctaatgtgtatgccgttggtggtaagaaaccaacatcaacttttttagacttcatagcttcaacaattgtattgtagttagttgatacagacactttaactggaattcctaattctttagatagtaatttttctaatggttttgctttagcctctaatgttccagcattttgcgaaggtacaaattgtactgttaattctttaggtttgtatcctcctgatttagaatccgaatcattactagcgttcttttgattatctaaagaacttgaatttccacatgctgctgcaaaaacaatgactgctaacattaatacaaataaacacttaaattttttcatttgataactgtccccttcacattcttaatcgtgtaatatgtatgcaatgaaattacacttatagcgtaccacatttaaatgcgaaaaagtattttataaaaatgaattttaataattttctttaagagtttgataagattttgtaaatttttcgttaaattgcccattacaaacatatatttatcctataattcaagaacaaatttattttaaaaggagcctcacaaaatgaaaaaaatatataagtcattaactgtctctgcaattgttgcaacggtatcattaagtgctttaccgcaatctttagctataacgcatgaatcgcaacctacaaagcaacagcgaacggtattattcgatcgttctcatggtcaaacagctggtgctgcagattgggttagtgatggtgcattttcagattatgcggattcaatacaaaaacaaggttatgacgttaaagctattgatggtcattcgaacataacagaagcaagtttgaaaagttccaaaatatttgtaattcctgaggctaacattcctttcaaagaatcagaacaggcagcaattgttaactatgtgaaacaagggggaaatgttgtctttatttcagatcattacaatgctgaccgaaatttaaatcgtattgattcatcagaggcaatgaatggttatcgacgtggagcgtatgaagatatgtcgaaaggtatgaatgcagaagaaaaaagttctactgcaatgcaaggtgtgaaaagttcagattggttatctacaaactttggcgtacgttttcgatataatgcactaggtgatttaaatacgagcaatattgtttcttcaaaagaaagtttcggtattactgaaggtgtgaaatctgtatctatgcatgctggatcgacattagcaattactaatccagagaaagcaaaaggtattgtgtatacaccagaacaattgccagcgaaaagtaaatggtcacatgctgtagatcaaggtatttataatgggggcggtaaagcagaaggtccctatgtagcaatttctaaagttggaaaaggtaaagcagcatttatcggtgattcatcacttgtggaagatagttcgcccaaatatgtaagagaagataatggagaaaagaagaaaacatatgatggttttaaagaacaagacaacggtaagctattaaataatataacggcttggatgtctaaagataatgatgggaaatcacttaaggcgagtggcctaacattagatacaaagactaagttgcttgattttgaacgaccagagctttcaactgagcctgaaaaagagccatggtcacaaccgccgagtggttataaatggtatgacccaacaacatttaaagcaggtagttatggcagtgaaaaaggcgcggatcctcagccaaacacaccagatgatcatacgccaccaaatcagaccgaaaaagtatcatttgatatcccgcaaaatgtttctgtaaatgagccatttgaagtgacaatacatttaaaaggatttgaagcaaatcaaacacttgaaaatcttagagttggtatttacaaagaaggcggacgtcaaatcggacaattttcaagtaaagataacgattataacccgccaggttacagtactttgccaacagttaaagcagatgaaaacggaaatgccacaattaaggtcaatgctaaagtacttgaaagtatggaaggttcaaagatccgtttaaaactcggtgacaaaaccttgattacaacagacttcaaataaatatataatagaaataagaaagatgtttgtgattgaaggagtgagtgaggatgtcaaacatagcattttatgtcgtgagtgacctacatggttatattttcccaacagattttacgagtagaaatcaatatcaacctatgggattgttactagcgaatcatgttatagaacaagacagaaggcagtatgaccaaagttttaaaatagataatggtgattttttgcaagggtcaccattttgtaattacttaatcgcgcatagcggcagtagccagcctttagttgatttttataatcgaatggcattcaactttggtacgcttggtaatcatgaatttaattatggattaccatacttaaaagacactttacgcagactcaattatccagttttgtgcgctaatatttatgaaaatgatagtacattgactgataacggtgtgcagtattttcaggttggagatcaaacggttggtgtgataggtttaacgacacaatttattccccattgggaacaaccagagcatattcagtcacttacgtttcatagtgcttttgaaacacttcaacaacacttacctgaaatgaagcgacatgcagatatcattgtggtttgttaccatggtggatttgaaaaggatttagaaagtggtatgccgaccgaagtgttaacgggtgaaaatgaaggatatgccatgttagaagcattttctaaagatatagatatctttattacgggtcaccaacatcgacaaattgctgaaagatttaagcaaacggctgtgattcaacctggtacgagaggtacaactgtaggcaaagttgtcttgagtactgatgaatatgaaaatgtatccgttgaatcatgtgaattacttcctgttatagatgattccacatttactattgatgaagatgaccaacatttacgaaagcagttagaggactggttagattacgaaattactacattgccatatgatatgacgattaatcatgcatttgaggcacgtgtggcaccgcatccttttactaattttatgaattacgctttattagaaaaaagtggtgcagatgttgcctgtacagctttgtttgattctgctagtggtttcaagcaagtcgtgacgatgcgagatgttattaacaattacccatttccaaatacatttaaagttttagctgtaagtggtgcgaaacttaaagaagccattgaacgatcagcagaatattttgacgtgaaaaatgatgaagtaagtgtgagcgcagacttccttgaacccaaaccccaacactttaattatgatatatatggtggcgtaagttataacattcatgttggaaggccaaagggacaacgtgtgagcaatatgatgattcaagggcacgcagttgatttaaagcagacatatacaatttgtgtaaataattatcgtgcagttggcggtggtcagtatgatatgtatatcgacgcgccagttgtaaaagatattcaagttgaaggcgcacaattacttattgattttttatcaaataataatttgatgcgcatcccgcaagttgttgattttaaagttgaaaagtgacggatatatgtaaaacttacttgattttaatcgggtaagtttttgtttttgtttaaactaatcactcttaaaaaccaatatactttaagaaaaatgttgattttacaaaaaataaggcttatattttatataacttaatattaggaagtgattaatttggaaacaattaaacaagaagtaagagaatctattgttaaaggaattatcgcgggatataaggactatgttaatgagagaaatgaagtcaagaaacgtatggtgattagtgatgcctatgtgtacaccaaatctaatcatattgaaaatcaagttgctaagcatttggaaaattttgttaagtatattaaagaaaatgctggaccatcatggaagtatttaaagtttatatttaataaagatgaagagaaaaataatatcatgtttatattgaaaaatgaagattactttgatgaaaaaatgtaagcgtagggaagagtttagttgctgataagaatcaaaaaagtaaaaactacctagagggacttatagctaagaatagtggcattaattttgatactgttggagaagattttaaaattaggcatcaaatgactgcagatagtatattatttaatataaaagaaggcagtaatagagatattaattcttattttttaattattacatatcgtattgataaagaatcaaagcaattagctgcaatcaaacaatggttaccaaatccagaaacaaattctgcaattatggttgatgatttgacagagttaatagaaaaagtaatagtagaaagagaagattatcatattgacgaagaagagttagaagtacttaaaaacgatggagagttagaactcatagatgtggaacatgcatttggtatcagtatcgatgaaggtaacgatatgattgaaagtgaaaggtgaagttaatgtttattggcaagaatttagaatacgtgagaaagcttaatgctctaagtagaaaagaattatcagaaaaaataaatgtgagtgaacaagcaatttggcaatatgaaacaaaaaatatgatgccagaaattagtaaaatttatgatatgacatctatttttaatgttaaatctagctactttattagcgagcagcccgaagagctcctaataaattctgtcgataaacatagtatagcttttagagcaaaaaattataaagtatctacgaaactattaaataagcaatattatcaagcaatgtatttatctaatttaactagctacttattttcttttgtaaagataccggataatattattttatctttaataaataatttagatgacttgttgaatggtaatttagaatcactaaataaaaaagaaagcataaaagaaattgctaaagttgtgagggctaaaattcttcaagacgaaagcaatgaagcactattatttatgcttgaaaaagcgggtatagttatatacgaaaagcgaattaatgatagcatagacgcatatagtttttggagtaaagatctgacaccttttattatactgggtacaaataagggggtagcagttagaaggaattttgatcttgcacatgagctgggacatctcgttctacatcgtcatattcaattcgacttattatctcctgaagaatataagacaattgaacatgaggcagatattttcgcctctgaatttttactacctgaagaagcgtttaaaaaggactttgatcaaatgacaaaaaaatcaaatcctgattatttagctgtattgaaagaaaaatggtatgtttctatacaagcaattgcaatgagagcctattatctaggtctaatgtctagtactcagtacagatatttttgggcatcattaaataaaaaaggctataaaagtaaagagcctttagacgacgtgattgaaatgtcacgtcctgtcaaaatgaatagtttattaaagttgtattttgatagaaatatactgacaccacaaaaattattgaattatttaaaagttgatgaaacatttttgaatcatctagcaggtattaatttaaaactctttaaggattatgttaatgaaaatagagaatataatataacgaatctatataaataaggcaccaatatttaaacctcgagctgaaaagatcatcatttcagttcgaggtttttatttgtaacatctattgataggtatcgacaaggaccttttaatgttgtgttttgtgcgatataacaagcttttttaggctattaaagaatattcagaattaaatatataattatgaataaattatgtcattgaaaaaattatgattataaaatcattctaaaaacaccgaaataacaatgatttcatgaaaacatttattttaaaatttgatatttgttcaaataatattcgaaattaaacttttttgtatagaattttctttatatcctgagagacatgtactataatgtttgtgaaataattcacaaagcataaaggagtggttgtatatgttaactatacctgaaaaagaaaatcgtggatcgaaagaacaagaagtggcaattatgattgatgctctagctgacaaagggaaaaaagcattagaagcattatctaaaaagtcacaagaagaaattgatcatattgttcatcaaatgagtttagcagctgttgatcaacatatggtgctagcaaaattagcacatgaagaaactggaagaggtatatacgaagataaagcgattaaaaatttatacgcttctgaatatatatggaattcaataaaagacaacaagacagtagggattattggtgaagataaagaaaaaggattaacgtatgtagcggaaccaattggtgttatttgtggtgttacgccaacaacaaatcctacgtcgacaactatttttaaagcgatgattgcaattaagacaggaaatccaatcatttttgcattccatccaagtgcgcaagaatcgtcgaagcgtgcagcagaagttgtattagaagcggcaatgaaggcaggtgcacctaaagatattattcaatggattgaagtgccttctatcgaagcaacaaaacaattaatgaatcacaaaggtattgcattagttctagcaacaggtggttcaggcatggttaagtctgcatattcaactggtaaaccggcattaggtgtgggaccaggtaacgtgccttcttacattgaaaaaacagcacacattaagcgtgcagtaaatgatatcattggttcaaaaacatttgataatggtatgatttgtgcttctgaacaagttgtagtcattgataaagaaatttataaagacgttactaatgaatttaaagtacatcaagcatattttgttaaaaaagatgaattacaacgcttagaaaatgcaattatgaatgaacaaaaaacaggtattaagcctgatattgtcggtaaatctgcagttgaaatagctgaattagcaggtatacctgtccccgaaaatacaaaacttatcatagctgaaattagcggtgtaggttcagactatccgttatctcgtgaaaaattatctccagtattagccttagtaaaagcccaatctacaaaacaagcatttcaaatttgtgaagacacactacattttggtggattaggacacacagccgttatccatacagaagatgaaacattacaaaaagattttggactaagaatgaaagcttgtcgtgtacttgtaaatacaccatcagcggttggaggtattggtgatatgtataacgaattgattccgtctttaacattaggttgtggttcgtacggtagaaactcaatttcacataatgttagtgcgacagatttattaaacattaaaacaattgctaaacgacgtaataatactcaaattttcaaggtgcctgctcaaatttattttgaagaaaatgcaatcatgagtctaacagcaatggacaagattgaaaaagtgatgattgtctgtgaccctggtatggtcgaattcggttatacaaaaacagttgagaatgtattaagacaaagaacggaacagcctcaaattaaaatatttagcgaagtcgaaccgaacccatcaacgaatacagtatataaaggtctggaaatgatggttgatttccaaccggatacaatcattgcacttggtggtggttcagcgatggatgctgcaaaagcaatgtggatgttctttgaacaccctgagacatcattcttcggtgctaaacaaaagttcctagacatcggtaaacgtacttataaaataggcatgcctgaaaatgcgacgttcatttgtatccctacgacatcaggtacaggttcagaagtaacaccatttgcagttatcacagatagtgaaacgaatgtaaaatatccgttggctgattttgctttaacacctgatgttgcaattattgaccctcaatttgtgatgagtgtgccaaaaagcgttacagcagatacaggaatggatgtactaacgcatgcaatggaatcatatgtatctgtaatggcttcagattacacaagaggtttgagtctacaagcgattaaattgacgttcgaatatttaaaatcatctgttgaaaaaggtgataaagtttcaagagagaaaatgcataacgcatcaactttggctggtatggcatttgcaaatgcattcttaggcattgcacactcaattgcgcataaaattggtggggaatatggtattccgcatggtagagcgaatgcgatattactaccgcatattatccgttataatgccaaagacccgcaaaaacatgcattattccctaaatatgagttcttcagagcagatacagattatgcagatattgccaaattcttaggattaaaaggtaatacgacagaagcactcgtagaatcattagctaaagctgtctacgaattaggtcaatcagtcggaattgaaatgaatttgaaatcacaaggtgtgtctgaagaagaattaaatgagtcaattgatagaatggcagagctcgcatttgaagatcaatgtacaactgctaaccctaaagaagcactaatcagtgaaatcaaagatatcattcaaacatcatatgattataagcaataatctatctgataataatcatctaactcacctgaaattacaaaagtaaaagatgccaaataaactttaagtcgataatcattatatggttatcggcttttatttattgccaaatcttcagagagatacaaactagacaatcatttttttaaataaagaaaatattaagattgatacccatttcacaaactattactactttagagtataattatttttaatttcatataaataaaaaggcgaaaataatgcggtttaaaagtaattaattgtttaaacgatatgtaatatgtaaatactatatatataataccaattttaatgaaaatttttaagggaggtaaataatggaaagtacattagaattaacaaaaattaaagaagtattacaaaaaaacttgaagattttaattattttaccgctattatttttaattattagcgctattgttacatttttcgtcttatcacctaaatatcaagctaatactcaaattttagtgaatcaaactaagggagacaatcctcagtttatggcgcaagaggttcaaagtaatattcaacttgtaaatacgtataaagaaattgttaaaagtcctagaattttagatgaggtgtcaaaggacttagatgataagtattcaccatctaaattatcgagtatgttgacaattacaaaccaagaaaatacacaacttatcaacatccaagttaaaagtggtcataaacaagattcggaaaaaattgcgaatagcttcgctaaagttacaagtaaacaaattccgaagattatgagtgtggataacgtatcaattttatctaaagcagacggtacagcagttaaagtcgcaccaaaaactgtagtgaatctaatcggtgcattctttttaggattagttgtcgcgcttatatatatcttcttcaaagtaattttcgataagcgaattaaagatgaagaagatgtagagaaagaattaggattgcctgtattgggttcaattcaaaaatttaattaaggatggttgctacttatgtcaaaaaaggaaaatacgacaacaacactatttgtgtatgaaaaaccaaaatcaacaattagtgaaaagtttcgaggtatacgttcaaacatcatgttttcaaaagcaaatggtgaagtaaagcgcttgttggttacttctgaaaagcctggtgcaggtaaaagtacagttgtatcgaatgtagcgattacttatgcacaagcaggctataagacgttagttattgacggcgatatgcgtaaaccaacacaaaattatatttttaatgagcaaaataataatggactatcaagcttaatcattggtagaacgactatgtcagaagcaattacgtcgacagaaattgataatttagatttactaacagctggtcctgtacctccaaatccatctgagttaattgggtctgaaaggttcaaagaattagttgatatgtttaataaacgttacgacattattattgtcgatacaccgccagttaataccgtgactgatgcacaactatatgcgcgtgctattaaagatagtctgttagtaattgatagtgaaaaaaatgataaaaatgaagttaaaaaagctaaaacacttatggaaaaagcaggcagtaacattctaggcgtcattttaaataaggcaaaagtagataaatcttctagttattatcactattatggagatgaataagtatgattgatattcataaccatatattgcctaatatcgatgacggtccgacaaatgaaacagagatgctggatcttttaaaacaagcgacaacacaaggtgttacagaaatcattgtaacatcacatcacttacatcctcgatataccacacctatagaaaaagtgaaatcatgtttaaaccatattgaaagcttagaggaagtacaagcactaaatctaaagttttattatggacaggaaataagaattaccgatcaaatccttaatgatattgatcgaaaagttattaccggtattaatgattcacgctatttactaatagaatttccatcaaatgaagttccacactatactgatcaattatttttcgaattacagagtaaaggctttgtaccgattattgcacatccagagcggaataaagcaataagtcaaaaccttgacatactatacgatttaattaacaaaggtgctttaagtcaagtgacaacggcgtcattagcgggtatttccggtaaaaaaattagaaaattagcaattcaaatgattgaaaacaatctgacacatttcatcggttcagatgcgcataacacagaaatcagaccgttcttaatgaaagacttatttaatgataagaaattacgtgattattatgaagatatgaacggatttattagtaatgcgaagttagttgttgatgataaaaaaattcctaaacgaatgccacaacaagattataaacagaaaagatggtttgggttataaacagcaaatgaggggttttatggcacatttatctgtgaaattgcggcttttaatactagcattaatcgattcactgatagtgacattttcagtattcgtaagttattacattttagaaccgtatttcaaaacatattctgtcaaattattaatattggcagctatatcactattcatatcgcatcatatttcagcttttatttttaatatgtatcatcgagcgtgggaatatgccagtgtgagtgaattgatattaattgttaaagctgtgacgacatctatcgttattacgatggtggtcgtgacaattgttacaggcaatagaccgttttttagattgtatttaattacttggatgatgcacttgattttaataggtggctcaaggttattttggcgtatttatcggaaataccttggaggtaagtcatttaataagaagccaactttagttgttggtgctggtcaagcaggttcaatgctgattagacaaatgttgaaaagtgacgaaatgaaacttgaaccggtattagcagtcgatgatgacgaacataaacgcaatatcacaattactgagggtgtaaaagtccaaggtaaaattgcggatattccagaactagtgaggaaatataagattaaaaaaatcatcattgcaattccaactattggtcaagagcgtttgaaagaaattaataatatttgccatatggatggcgttgagttattgaaaatgccaaatatagaagacgtcatgtctggtgagttagaagtgaaccaactgaaaaaagttgaagtagaagatttactaggcagagatcctgttgaattagatatggatatgatatcaaatgaattgacgaataaaactattttagttacgggtgcaggtggttcaataggatcagaaatttgtagacaagtttgtaatttctatccagaacgtattattctacttggccatggtgaaaacagtatttatttaatcaatcgtgaattgcgaaatcgcttcggaaaaaatgttgatatcgttcctattatagcggatgtgcaaaatagagcgcgtatgtttgaaattatggaaatgtataaaccatacgcagtttatcatgcagcagcacacaagcacgtgccgttaatggaagacaaccctgaagaagcagtacgtaataatattttaggtacgaaaaatactgctgaagctgctaaaaatgcagaggtaaagaaattcgttatgatttctacggataaagccgttaatccgcctaatgtcatgggagcttcaaagcgaattgcagaaatgattattcaaagtttaaatgatgaaacgcatcgaacaaattttgttgcagtgagatttggtaatgtacttggatcgagaggatctgtgattccacttttcaaaagtcaaattgaagaaggtgggccagttactgtgacacatcctgaaatgacacgttactttatgacaattcctgaagcttctagactagttttgcaggcaggggcattagcagaaggtggcgaagtatttgtgctagacatgggagaaccagtgaaaattgtagatttggcacgtaatttaattaagctaagtggtaaaaaagaagacgagatacgcattacttatacagggattagacccggtgaaaaaatgtttgaagagcttatgaataaagatgaggttcatcctgaacaagtatttgaaaaaatttatcgtggcaaagtacaacatatgaaatgtaatgaagttgaagcgattattcaagacatcgtcaatgactttagtaaagaaaaaattattaactatgccaatggcaaaaagggagataattatgttcgatgacaaaattttattaattactgggggcacaggatcattcggtaatgctgttatgaaacggtttttagattctaatattaaagaaattcgtattttttcacgcgatgagaaaaaacaagatgatattcgaaaaaaatataataattcaaaattaaagttctacattggtgatgtgcgtgatagtcaaagtgtagaaacagcaatgcgagatgttgattacgtattccatgcagcagctttaaaacaagtgccgtcatgtgaattctttccagttgaggcagtgaagacaaatattattggtacagaaaatgtcttacaaagtgctattcatcaaaatgttaaaaaagtcatatgtttatctacagataaggcagcgtatcctattaatgctatgggtatttcgaaagcaatgatggaaaaagtattcgtagccaaatcaagaaatattcgtagtgaacaaacgcttatttgcggtacaagatacggcaatgtgatggcttcaagagggtcagtaattcctttgtttatcgacaaaatcaaagctggagaacctttaacgattacagatcctgatatgacaagatttttaatgagtttagaagatgcggtagaactagttgttcatgcatttaagcatgcagagacaggcgatatcatggttcaaaaagcaccaagttcaacggtaggggatcttgcgaccgcattattagaattgtttgaagctgataatgcaattgaaatcattggtacgcgacatggagagaaaaaagcagaaacattgttgacgagagaagaatacgcacaatgtgaagatatgggtgattattttagagtgccggcagactccagagatttaaattatagtaattatgttgaaaccggtaacgaaaagattacgcaatcttatgaatataactccgataatacacatattttaacggtggaagagataaaagaaaaacttttaacactagaatatgttagaaacgaattgaatgattataaagcttcaatgagataggagagattgacgttgaatattgtaattacaggagcaaagggttttgtaggaaaaaacttgaaagcagatttaacatcaacgacagatcatcatattttcgaagtacatcgacaaactaaagaggaagaattagagtcagcgttgttgaaagcagactttgtcgtacatttagcgggagtcaatcgacctgaacacgacaaagaattcagcttaggaaacgtgagttatttagatcatgtacttgatatattaactagaaataagaaaaagccggcgatattattatcgtcttcaatacaagcaacacaagataatccttatggtgagagtaagttgcaaggtgaacagctattaagacaatatgccgaagagtatggcaatacggtttatatttatcgctggccaaatttattcggcaagtggtgtaagccgaattataactcagtgatagcaacattttgttacaaaattgcacgtaacgaagagattcaagttaataatcgggacgttgaactaacgctaaactacgtggatgatatcgtcgctgaaataaaacgtgctattgaaggaactccaacgattgaaaatggtgtacctacagtaccaaatgtatttaaagtgacattgggagaaattgtagatttattatacaagttcaaacagtcacgtctcgatcgaacattgccgaaattagataacttatttgaaaaagatttgtatagtacgtatttaagctatctacctagtacagactttagttatcccttacttatgaatgtggatgataggggttcttttacagaatttataaaaacaccggatcgtggtcaagtttctgtaaatatttctaaaccaggtattactaaaggtaatcactggcatcatactaaaaacgaaaaatttctagtcgtatcaggtaaaggagtaattcgttttagacatgttaatgatgatgaaatcattgaatattacgtttctggcgacaaattagaagttgtagacataccagtaggatacacacataatattgaaaatttaggcgatacagatatggtaactattatgtgggtgaatgaaatgtttgatccaaatcagccagatacgtatttcttggaggtatagcgcatggaaaaactaaaattaatgacaatagttggtacaaggcctgaaatcattcgtttatcatcaacgattaaagcatgtgatcaatattttaatcagatattagtacacactggtcaaaattatgattatacattgaatcaaattttctttgatgatttggaattaagacaaccggaccactacttagaggcagttggaagtaacctcggagaaacgatggggaatattattgcgaaggcatatgatgttttattacgcgaacaaccagatgcacttttaattcttggtgatacaaatagttgcttagcagcagtatctgctaaacgattaaagattcctgtgttccatatggaagcgggtaatagatgctttgatcagaatgtacctgaagaaatcaatcgtaaaattgttgaccatgtcagtgatgtgaatctaccttatacagaacatagcagacggtatttattagatgaaggcttcaataaagcgaatatctttgtgacaggatcaccgatgacagaagtgatagaagcgcatcgagataaaattaatcacagtgacgttttaaataaactaggattagaaccgcaacaatacattttagtatctgcgcatagagaagagaatatcgataatgaaaagaattttaaatcattaatgaatgcgataaatgatattgccaaaaagtataaaatgcctgtgatttattcaacgcatccaagaagttggaagaaaattgaagaaagtaaatttgaatttgatccattagttaaacagttaaagccatttggtttctttgattataatgcattgcaaaaagatgcatttgttgtgctatcagatagtggaacattgtcagaagagtcgtctattttgaagttccctggtgtccttattcgaacttccacagaaagaccggaagtactagataaaggtacggttattgtaggtggtattacctataacaatctaatccaatctgttgaactagcaagagagatgcaaaacaataacgaaccgatgattgatgctattgattataaagacactaacgtttcgacaaaagtagttaaaattattcaaagttataaagatattatcaatcgaaatacttggaggaaatgacgatgaggatagcgattcttggcgctactaacattaagcatatgtcattattatcacattatttaaaccacattgatttgaatatcaatgaggtggacattatatacactgacaaatatgatatcgaagaacatatccaaggcatcaataattactataaatataaagtagatattaaagaagattggacatttatcaaaaaagctattgcttactatcgatttaggccatacgctatgaaaattcttaaagaaaatcattatgattttgtcatagtatggggaagttatacaggacacttatttaaaagttttttagaaaaacactataaaaataaatttattttaaatataagggactacttttttgaaaataataaacttattaagtatagaatgaaaaaaatcgttgatgctagcaggctgacaacattatcttcagaaggttttcttaaatttttacctaaatctgaaaaatatagaattatttatagttataacatgagtattattagagaaagtaatgtgaccgatggattcaaaaaaagatggccaattaatataggttttattggtaatgttagatttaatgagataaatcaaaaattgataaaggaactggcaaatgattcaaggttccatatgcaatattttggaacagggtcggaaaaattagaagtctttgctcgagaaaattttattaataatattacattttctggcggctttgacttgaaagaaacaccgaaatatttaaatgaaattgatatacttaataatttgtttggtaatcaaaatattgctttagatactgctttatccataagaatgtattatgcgttgtttttaaacaaacctattattacaacagatgatacattcaccgctacagaagctaataaattcggactgggttttagtattaatccagaaaatttaaaaggtattggtgatgaattgatggattggtataacaatttggatgtaatggacattaatcataagagagaaccttatagaaacgatgtaattgaaaataataaacagttctatcaagagataggcaggatatttaatgaataagatatataatgtcacttcatatgttattgccattttaatgtttccttgccttatgttaggtgataaacctttattatttttagcacctataagttatggagtaggaaagctctttataagcttctcgaataatccgaattttaaattttcgaaaattgtatacgatgttttaggttttcttagattagtatttatacctgctatgatagtgtttttccaggattcaactatagataatttaccattaggacaagcttattttaatcaagcggttatttatatgagtgtggagtttatcataggctctctatttatattgatactatctaaattattcaaacatgaagtggtatcaagaaatagctttacactttctggatcatcaatttattacattgtgtttggtcttgttatttgtgggatttttgtagcttttcccgaagtgcgcaaaaacatatcatttttaattattaaaacagatgcaatgggaagaggaaccgaagcaacaagtggtttaaatgtcctttttgtaatgctatttcaacttgccttagcgttattattcttaataatcgcatatgcttcatataaaaagtataaagagaatcctaaaattatttatgttgtattgccgctagctataggaattttaaatattagtttaattgttggtgaaagaagaagttatcaactttatacgatggttgctgttttaacagtggtgtcactcttgttttctaagcacaaaagacgtatcaatatcattattatatctgttggtattttcgtattagcattgatgacactatataaagaattgtatgtgtttaattatagttcatatagcgaggcgttaaatagtacaagtgtaagtaatcttaagatagttgacacgttgcagtcatatttttatggacctagcaatattgcagcttctatagactatttgaattactataatggttcgttcaaacaatatttatttgataatactagagctgtttttggttttaatttctttgtagataaaaagcagttgattactagccaactttttaaccaattgatatatggtagtaaacaattgactgggcatctaatttcgagtgctggatatggaattatttattttggacccttattcttctatttgaatttaattgcaaatatcttttttgcatttctgagtgagtatattattcggaagagtcattcgttagaagtgatatttattggtacatatatttatatgagacttattacgagtatttttagtcacccgacaccattaatcacattgatttctatgattttagttgtatatgttatagctattatcccaggcattataataaaaaaatttactaaaaaagtagggatagaatgattgtaaaaacatttatgaaatcgaaaatatttagattaatgaatacaccactattattattttataagaaagaatatttaactggatattattttgaaaataaagtggctggatggttatgggcgtggaaagctgttccgttcaagttgttaggaataaatacgagcttgccatttcctgcagatataactgttagaatgcataaccctaataacattgtttttgataaaaatgatattcatattttccaatcgcccgggacgtattttaataatttttcagcagttatatatataggtagaggtgtttatatagcgcctaacgtaggtattattacagctaatcataatattaaaaatttgaagtcacatgcaccaggtgaagatgtcaaaatagggaattatagttggattggaatgaactcagttatattaccaggagtagaattgggggaacatacaattgtaggggctgggtcggttgtaacaaaaagttttccagaaggtaacgttgttataggtggaaatccagcgaaagtcatcaagaaaatctgaggttaattatgagattaaataaatttattggcgattcgttcttaatgattttaagcagtggcatcgctcaagtcatattaatcatcactaccccaattattacaagactatattcacctacagaatttggtgagtttacaattttttcaaatatcgcaatgattttaataccaataataaatgcaagatacgatttgttgattgtgaataccaaaaatgaccgtagtgctaatatactttcacaaatcagttttttgatatcattgcttattttattaatactgataccaatatttgcgattagtgcatggttatacccaaactttatattagattttattttcattattattatgttgtttttggtaagtttaacaaacatttttacaaattatctaaataaggaaagaaaatataaagtgttaagtttgattaatgtgtttagagctggatcaatggctttacttcaaatcattttcggacttttagcattaggaagtctaggattaattattggtttttcattatcctatatcgcaggcattacactaggatataaaacgtttaaaaagcactttaatattgtgagagataaagaagaaactaaagcattatttttagaaaataaaaatcagttagtttattcaacaccatcaatattattaaatagtttgtctttctcggttgttgtgttctttataggtattttgtataccaatacagaagtaggtatttatggtatggccataagagtactaggcataccagtgacaattatttctttagggttatcaaaaatatttatgcaacaagctaatgactattatattgagcatggtagcttccgaaatttattacttaaatttagttccatactggttatagtttctataattctttatatgccactttatttgttcagtgaagaattagtcaatatattattaggacacagctgggttgacgcaattacagttataaaaattgttatcccattatttgttatcaggctgattgtatcaacggtatcactttctgtgattgtattacaaaagcaacagttagaattaatactacaagcgttatttttaataggtactactgtaacatttgttatatcaaaaatgcttaatttaacttttttaaactttgtatctattaatacagttgttttaatcgtatcgtacatgatatttttcatagcactctattattttgctaaaaataaacagttcaaaaattcttagtctaaattcattaataaaaaggacgtcgattagatgagtgaaaaaaagattttgattttatgtcagtatttttatccggaatatgtatcttcagcgacgttaccaacacaattggcggaagatttaattgcgaatcacattaatgtcgatgtcatgtgtggatggccatatgaatatagtaatcataaacaggtttctaaaaccgagatgcatcgtggtattcgcattcgacgtctcaagtattcgaggtttaataacaaaagtaaggttggaaggatcatcaatttctttagtttattttcaaaattcgtgattaatatacctaaaatgttgaaatatgatcagattcttgtttactctaatccaccaatcttgccattaataccagacgttctacacagactgcttaagaaaaaatattcttttgtggtatatgatatagcacctgataatgcgattaagacaggtgcaacacgtccaggtagcatgattgataaactgatgcgttacattaataaacatgtctacaagaatgctgaaaatgtcattgtccttggtacggaaatgaaaaactatttagtaaatcatcaaatttctaaaaatcctgacaatattcatgtgattcctaactggtatgacatgcgtcagttacaagacaatcgtatctataatgacacatttaaagcttaccgtgagcaatacgacaaaattatattgtatagcggtaatatggggcagttacaggatatggagacacttatctcatttttaaaattaaataaggatcagcctcaaacgttaacaatactttgtggtcatggtaagaaatttgcagatgtcaaaacggcaatagaagaccatcgtattgaaaatgttaaaatgtttgagtttttaacaggtacagactatgctgacgtattaaaaattgcggatgtatgtattgcatcgctgattaaagaaggcgttggtttaggcgtgccgagcaagaattatggctaccttgcagctaagaagccgttggtactcatcatggataagcaatctgatatcgttcaacatgttgaacaatatgatgcgggtatccaaattgataatggcgatgcacatgccatttataacttcatcaacactcactcgagtaaggaattgcacgagatgggtgagcgcgcacatcaactgtttaaagataaatatacgagagaaattaatactatgaagtattacaatctgttgaagtgaggagataattatgaagcgattattcgatgtagtgagttcaatatatggtttagtagttttaagtccgattctgttaattacagcattactaattaaaatggaatcacctggaccagccattttcaaacaaaaaagaccgacgattaataatgaattgtttaatatttataagtttagatcaatgaaaatagacacacctaatgttgcaactgatttaatggattcaacatcgtatataacaaagacagggaaggtcattcgcaagacctctattgatgaattgccacaattattgaatgttttaaaaggagaaatgtcaattgtaggtcctagaccagcgctttataatcaatacgaattaatcgaaaaacgtacaaaagcgaacgtgcatacgattagaccaggtgtgacagggctagctcaagtgatggggagagatgatattactgatgatcaaaaagtagcgtatgatcattattacttaacacatcaatctatgatgcttgatatgtatatcatatataaaacaattaaaaatatcgttacttcagaaggtgtgcatcactaatgagaaaaaatattttaattacaggcgtacatggatatatcggaaatgctttaaaagataagcttattgaacaaggacatcaagtggatcaaattaatgttaggaatcaattatggaagtcgacctcgttcaaaggttatgatgttttaattcatacagcagctttggttcacaacaattcacctcaagcaaggctatctgattatatgcaagtgaatatgttgcttacgaaacaattggcacaaaaggctaaagctgaagacgttaaacaatttatttttatgagtactatggcagtttatggaaaagaaggtcaggttggtaaatcagatcaaattgatacacaaacaccaatgaaccctacgaccaattatggtatttccaaaaagttcgctgaacaagcattacaagagttgattagtgattcgtttaaagtagcaattgtgagaccaccaatgatttatggtgcacattgcccaggaaatttccaacggttaatgcaattgtcaaagcgattgccaatcattccaaatattaacaatcagcggagtgcattatatattaaacatctgacagcatttattgatcaattaatatcattagaagtgacaggagtgtaccatcctcaagatagtttttactttgatacatcgtcagtaatgtatgaaatacgtcgccaatcacatcttaaaacggtattgatcaacatgccttcaatgctaaataagtattttaataagttgtcggtctttagaaaattattcggcaatttaacatacagcaatacattatatgaaaataataatgcgcttgaagttattcctggaaaaatgtcacttgttattgcggacatcatggatgaaacgacaaccaaagataaggcataagtcatctattaaataaaatcaacatacaaatcgttttatttggaggttatagtatgaagttaacagtagttggcttaggttatattggtttaccaacatcaattatgtttgcaaagcatggcgtcgatgtgcttggtgttgatattaatcagcaaacgattgataagttacaaagtggtcaaattagtattgaagaacctggattacaagaggtttatgaagaggtactgtcatcgggaaaattgaaggtatctacaacgccagaagcatctgatgtttttatcattgccgttccgacgccgaataacgatgatcagtaccggtcatgtgacatttcgctagttatgcgtgcattagatagtattttactatttttagaaaaaggaaatactattattgtagagtcgacaattgcgcctaaaacgatggatgattttgtaaaaccagtcattgaaaatttagggtttacaataggtgaagatatttatttagtacattgtccagaacgtgtactgccaggaaaaattttagaagaattagttcataacaatcgcatcattggcggtgtgactaaagcttgtattgaagcgggtaaacgtgtctatcgcacattcgttcagggagaaatgattgaaacagatgcacgtactgctgaaatgagtaagctaatggaaaacacatatagagacgtgaatattgctttagctaatgaattaacaaaaatttgcaataacttaaatattaatgtattagatgtgattgaaatggcaaacaaacatccgcgtgttaatatccatcaacctggtccaggtgtaggcggtcattgtttagctgttgatccgtactttattattgctaaagaccctgaaaatgcaaagttaattcaaactggacgtgaaattaataattcaatgccggcctatgttgttgatacaacgaagcaaatcatcaaagcgttgagcgggaataaagtcacagtatttggtttaacttataaaggtgatgttgatgatataagagaatcaccagcatttgatatttatgagctattaaatcaagaaccagacatagaagtatgtgcttatgatccacatgttgaattagattttgtggaacatgatatgtcacatgctgtcaaagacgcatcgctagtattgattttaagtgaccactcagaatttaaaaatttatcggacagtcattttgataaaatgaagcataaagtgatttttgatacaaaaaacgttgtgaaatcatcatttgaagatgtatcgtattataattatggcaatatatttaattttatcgacaaataaaatgtgtcaaactaggacatacatgattaaggaaagataagctgtcatgtgtttgaacttcagagaggataatgttatgaaaaaaattatggttattttcggtacgagacccgaagcaataaaaatggcaccattagtaaaagaaattgatcataatgggaactttgaagcgaacattgtgattacagcacaacatagagatatgttagatagtgtgttaagtatatttgatattcaagctgatcatgatttaaatattatgcaagatcaacaaacgttagcgggccttacggcgaatgcgcttgctaaacttgatagcatcattaatgagaaacagccggatatgattttagtacatggtgatactacaacgacttttgtaggaagtttggcagcattttatcatcaaattccggtcggacatgtagaagctggacttcgaacacatcagaaatactcaccatttcctgaagagttaaatcgagtcatggtaagtaatattgctgaattgaattttgcgccaacagtaattgcagctaaaaatttactttttgaaaacaaagacaaagagagtatctttattactggaaatacagttattgacgcattgtcaacaacagttcaaaatgattttgtttcaacgattattaataaacataaaggcaagaaagttattttactaacagcgcatcgtcgtgaaaatattggggaaccgatgcatcagatttttaaagcagtaagagatttggcagatgaatataaagatgttgtcttcatttatccaatgcatcgtaatccaaaggtaagagcgattgccgaaaaatatttatctgggagaaatcgaattgaattaattgagccattagatgcgattgagttccataattttacaaatcaatcgtacctcgtgctgacagattctggtggtattcaagaggaggctcccacgtttggaaaacctgtgttggtattaaggaatcatacagagcgtcccgaaggcgttgaggcgggaacatcgagagtaattggcacagattatgacaatattgttcgaaatgtgaaacaattgattgaggatgatgaagcgtatcaacgtatgagtcaagcgaataatccatatggtgatggacaagcatcacgacgtatttgtgaagcaatagaatattattttggattgcgttcagacaagccggatgaattcgtacctttacgtcacaaataataaaaaacccctaatcatgaagttggtttagacaaccagcggtgactaggggtttttaatatgtttatttttgatagtggtagccaatatcatatttgaatactttatttgataatattggactttgctgttcatcgtcatcactttttaaacgtacatttttatgagcttctttaaatacatcggaattcaaccaattattaaagctatcttcagattcccaaatagttaagattttaacttcatctgtatccttggtatttaatgttttagtgacaaacatttgttggaagccttcaatagtttcaataccttgtctattgtaaaaacgttcaatcgtttcttccgcactgcctttttgtaattgtaatctattttctgccataaacatgggcaatcactcctctattttattatttgatttgggtaatgtttttacaaatgtaaagagtacagcggtttgtatgataaccattatgattaatcctatacggactgcaagaacatccaccatataaattgaaaaacctattacaatgtataagctaattaaaattttaattttctgttgtagcgtgtagcctcgatgtaaataaaagttttctacatattctttataaattttttgattaataagccaattgtaaaagcgatctgaacttcgagcaaaacaaaaaactgctacgagtaaaaaaggggtcgttggcagtaaaggtaatacggcacctgcaataccaagcgctgtaaatattaagccaatgacgattaaaataagtcgcattgaaaaaactccattctagtactaatgcgcatgtaatattgttttagtaatataaatcatgctaaatataatgtgtatgataagtgcaatgactcagtaaaatgaaacgttgttgaattatccttgtcccattaacgcattttaagcgcgactttcataacaaccaaactatttaatgagaattgttctcaagtattatagttatattatgtgttttatttttgaaaagtgcaatatgttttcgaaaataatattatttttatgtgcaaaaacgacgcaaaagttttaaaaatgagacttctgtgagctgattattttataaaatgtaaacgcttactatataatgtgaatcatatcgtttaaaagcattattaaatatgatgctaagagatttatattatagccaataaacaaaggagagataatatggcagtaaacgttcgagattatattgcagagaattatggtttatttatcaatggggaatttgttaaaggtagcagtgacgaaacaatcgaagtgactaatccagcaactggagaaacactatcacatattacaagagcaaaagataaagatgtcgatcatgccgtcgaagtggcgcaagaggcatttgaatcatggtcattaacttctaaatcagaacgtgcacaaatgttgcgtgatattggtgataaattaatggcacaaaaagataaaattgcaatgattgaaacattaaataatggtaaaccgattcgtgagacaacagcaattgatattccatttgctgcaagacatttccattatttcgcaagtgttattgaaacagaagaaggtacagtgaatgatatcgataaagacacaatgagtatcgtacgacatgagccgattggcgtcgtaggtgctgttgttgcttggaacttcccaatgctattagctgcatggaagattgcgccagccattgctgcaggtaatacaattgtgattcaaccttcatcttcaacaccattaagtttattggaagttgctaaaattttccaagaggtattacctaaaggtgttgtcaatatactaacgggtaaaggttcagaatcaggtaatgcaattttcaatcatgatggtgtagataaattatcatttacgggctcaactgatgtaggttatcaagttgccgaagctgcagcaaaacatctagtacctgctacattagaacttggtggtaaaagcgccaatatcatattggatgatgctaatttagaccttgcagttgaaggtattcagttaggtattttattcaaccaaggtgaagtatgtagtgcaggttctcgattattagttcatgaaaaaatttatgatcaattggtgccacgtttacaagaggcattttcaaatattaaagttggagacccacaagatgaagctacacaaatgggtagtcaaactggtaaggatcaattagataaaattcaatcatatattgatgcagcaaaagaatcagatgcacaaattttagcaggtggtcatcgcttaactgaaaatgggttagataaaggattcttctttgaaccgacattaattgctgtgccagataatcatcataaattagcgcaagaagaaatatttggaccagttttaacagtgattaaagtgaaggatgatcaagaagcaattgatatagctaatgattcagagtatggtttagctggcggcgtattttctcaaaatatcacacgtgcattaaatattgctaaagctgttcgtacaggacgtatttggattaacacttacaaccaagtaccagaaggtgcaccatttggtggttataaaaaatcaggtatcggacgagaaacttataaaggtgcgttaagtaactatcaacaagttaaaaatatttatattgatacaagcaacgctttaaaaggtttgtactagaatcaatatcatttttgaggcgtgttcgtaggtcagtctagcggtaagtcttaacatgtttacggagttgtttagattttaagcgaaacaaaatatttaggaacatgcataatgatattaggatataatgactaaaataatagcagtaggatggtttttaattgcaaatcatcatactgctgtttttaattatgctaatttgcgatgccgctattataaggacagagttgtttatgaattatggtgatttagaaatatgaagttcaatatgcaaagtcatcgtttgttttaatatgcggaacaatcattaaagttattgcgattttttgaacttaatgaaactaaacaataaatttgagatgcttttttgtcatttttatgtaactaacacaataatctcgtacattattaaaaatttctatatgatagggataaagcaaagagcgagtgtgctgtaaaagtttttccaaggtgatattacataaaggtataaagggtaaagattaatgagttgtcatgtgaagaacgatggtgtataaatcatggttaattacggaagcattaatattaatctgagaagctataaagaattatttttaaaagcgacaatattaaatacgacgcatttatttaggagtggcaaacgtatgaatgggaaaaaggcgaatacgataaacagatacaaatattttcatcatgtcaatcatcaaaaaattcaacaaagttctaaaaagacgctgtgggcatcacttatcatcacattgttatttacagtgattgaatttgtcggaggtttagtatctaattcattggcattactgtcagattcatttcatatgcttagtgatgtattagcacttggtttatccatgttggccatttattttgcaagtaagaagccgactgcacgatatacatttggatatttaagatttgagatattagctgcatttttaaatggtttagcattaattgtcatttcaatctggattttatatgaagctattgtacgtattatttatccgcaaccaattgaaagtggcattatgtttatgattgctagtattggtttactcgtcaatattattttgactattatccttgtaaggtctttaaaacaagaagacaatatcaatattcaaagtgcattatggcatttcatgggagacttattgaactctattggtgtcatcgttgcagttgtattgatttactttacaggatggcgcatcatcgacccaatcattagtattgtaatttcactcatcattttacgtggtggttataaaattacgcgtaatgcgtggttaattttaatggaaagtgtgcctcaacatttggatactgatcaaattatggcagatattaaaaacatagatggcatattagatgtacatgaatttcatttgtggagtattacaacagagcattattcattaagcgcccatgttgtgttagataaaaaatatgtgggcgatgattatcaagcgattgatcaagtatcatcattgttgaaagaaaaatatggcattgcacattcaacgttgcaaattgaaaacttgcaattgaatccattagatgagccatacttcgacaaattaacataaataaaacattgtagcgcctaaaacattaatctatgtcataagcgcacgttttgttttggattatgttgcatcatttaaatgattttcgtcaatttctttgatgttatctacatctaacacgacatctttaggtttcaaaatatgaatatgtttttcatcatttgtatgtaaaatgcgttctatgatgtacctttgaccggccattgtttctacagcaatctttttgtttcttgctaaacttgctacgacggattctttatccattatgatagccccctatatatatgtttatttacttataccctaacattatttttatactctttgaaaatatattttacagaattttatctaaatatttaaaaaaatcgctcaatatccttgtaatccgataaggattgtagtaatattttttcaaccattgttataggaggtcttattaatgacattatttttattagaagctaacaatcttgattttgcatcaacgaaagaagaactagaagcaaaggcagcatcactatctacgaagacaattccaacattaattgaagtacaagctactgaaaatttaactcatggttattttattgtggaagcaaatgacgaagcagaagctaaacaatttttaacaaaagcaggtattagtattcaattagtcaaagaagtacgcttagttggtaaagatttagatgaagttaaaaatggtgatgcacatgttgattaccttgtaacttggaacattcctgaaggtattacgatggatcagtatttagcacgtaaaaagaaaaattctattcattatgaagaagtaccggaagttgaatttaaacgcacatatgtatgtgaagatatgtctaaatgtatttgtttatacaacgcacctgatgaagaagcggtacgtcgcgcgcgcaaagcagttgatacaccgattgatggcatcgaaaaactttaataagacaacaagttgatgagatatatgtatataggtttggcgtggttttagatggcagttaattagaatagctcaatgctataaatgtaagtagttgatatggcgaaactaatgaactatatgcaattattggctaaaacaatcattttattaaattttgtagagctgaaattaatataacgtcgttaattgaataacgcttatgttataagagcgctcgcaccaaaccataatcatctatagatataacaattcacgatttaagggctgtgtttggcatagccctttagatatacatttaattcttattaaaatagtagggattaaaagggggcttgtcatgattaaaatacaacaattacaacatcactttggattgcataaagtaattcataactttaatttggacattagtaagggagaaatagtcacttttataggaaaaagtggttgcgggaagtctactttactcaatattatcggtggatttattcatccatcatctggtcgtgtcattattgataacgaaattaaacaacagccgtctccagattgtttaatgctatttcaacatcataatctgctgccatggaaaacgattaatgacaacattaggattggattccaacagaaaattagtgatgaagagattaacgcacagcttaaattagttgatttagaaggcagaggaaagcattttcccgagcaactgtccggaggtatgaaacaacgtgtagcattatgtcgagcgcatgtgcataagcctaacgttatattgatggatgagccattaggtgcattagatgcgtttacacgctataaacttcaagatcaactagtgcaactaaaacacaaaacggaatcaactattatcttagtcactcacgatattgatgaagctatttatctttccgaccgcattgttctattaggagaaggatgcaatattatttcgcaatatgatattacagcatcacatccacgcagtcgcaatgatagccacctacttaaaattcgtaatgatattatggaaacatttgcattgaatcatcatcaagttgaacctgaatattatttataaggagtgagtgacgatgaaaaggttaagcataatcgtcatcattggaatctttataattacaggatgtgattggcaaaggacgtctaaagaaccgtctaaaaatgcccaacagcagcaagtgattaaaattggatatttgccgattacacattcagctaatttgatgatgactaaaaaattattatcacaacacaatcatccgaaatataaattagaattagttaaattcaataattggccagatttaatggacgcattaaacagtggtcgtattgatggtgcatctaccttgatagagctcgcgatgaaatcaaggcagaagggctcgaatataaaggctgtggcattgggtcatcatgaaggcaatgtcattatgggacaaaaaggtatgcacttaaatgaatttaataataatggcgatgattaccgttttggtataccacatcgttattcaacacattatcttttacttgaggaattacgtaaacaattgaaaattgaaccgggtcatttcagctatcatgaaatgtcgccagcggagatgccagccgcattaagtgaacacagaattacagggtattctgtagccgaaccattcggtgcactgggtgaaaagttaggcaaaggtaagactttgaaacatggtgatgacgttatacctgatgcgtattgctgtgtgctagtactgagaggcgaattgcttgatcaacacaaggatgtagcgcaagcatttgtacaagattataaaaagtctggctttaaaatgaatgatcgcaagcaaagtgtagacattatgacgcatcattttaaacaaagtcgtgacgttttaacacagtcagcggcatggacatcctatggtgatttaacaattaagccatccggctatcaagaaattacgacattggtaaaacaacatcatttgtttaatccacctgcatatgatgactttgttgaaccgtcattgtataaggaggcatcacgttcatgacacgtctcacaattaataaaattatattacctattatcacatttattattttcttaggcatttgggaaatggtcattattattgggcattaccaacctgtattgttacctggtcctgctcttgtaggaaaaagcatatggactttcattgttactggagaaattttccaacatttagcaattagtttatggagatttgtagcgggctttgttgtcgcattggtggttgctattccattgggcttcttgcttggaaggaatcgttggttatacaacgctatcgaaccgctatttcaattgattaggccgatatctccgatagcttgggcaccatttgttgttctatggtttggtattggtagtttgccagcgattgcgattatttttatcgctgcttttttcccaattgtgttcaataccattaaaggcgttagagacattgaacctcaatatttaaaaatagcggcaaatttatatttaactgggtggtcattgtatcgcaatatattatttccgggggcatttaaacaaatcatggctgggatacatatggcggtaggaacaagttggatatttttagtttctggtgaaatgattggtgcacaatcgggattaggttttttaatcgttgatgcacgaaatatgttgaacttagaagatgttttagcagcaatattctttatcggattatttggttttattattgatcgattcattagttatattgagcagtttatacttagaagatttggtgaataaggagagatgaagatgactttagaaacgcttatcaaagaacaattagatcctcatttagtagaagttgatgaagggacgtattatccgagatcatttatccaacaattatttgtagatggctattttggtgaagcgacactgagaaaaaatgctgaagtaatcgaagctgtatcgcagtcttgtttgacaacaggattttgtttatggtgccaattggctttttcaacgtatttagaaaatgccgcgcagccacatttaaataaagacttacaacaacaattgttatctggtgaaatattaggtgctactgggttgtctaatccgatgaagtcatttaatgatttagaaaagttgaatcttgaacacacttatgttgatggacaattggttgtcagtggacgtatgccagcagtaagtaatattcaagaagaccattattttggtgcgatttcgaagcatgaatcatcagatgaatttgtcatgttcattctacgtgccaatcaagatggtatcacccttgttgaaaaaacaaattttttaggggtaaacggctcagcaacgtatcaaattactttgaatcaagtcgtagtgccacaatcacaaattatcacgcatgatgcgaagcagtttgcggcaactattcgcccgcaatttattgcttaccaaattccaataggattaggctcaattaaaagttctttagagttaattgatgcattttcaaatgcgcaaaacggaataaatcaatatttagagtatgatgttgaagcttttaaaaaacgttatcatcaacttagagaggaatattatgcaatattagatgacggtaacttaacttcacatttaaatgaattaatatcattgaagaaggacatcggctatttattgctagatgtgaatcaagcttctgttgtcaatggtggctcaagagcatatacaccatattcaccacaagttcgcaagttaaaagaaggattcttcttcgcagcattgacaccaacattaagacatttaggtaaactcgaagcagagttgaatagctaactgaattaagatggtgcataattctattcgtcgaaaactactaccgttttatagatggtagtagttttttactgcgattacgcatataaaatttagtgcctgaattataatacaacgttcgggcacatatgtgttcacttacgcaattattgataaatttcaatcatctggaataatatataattagagagtgggacagaaatgatattttcgtaaaatttatttcgtcgtcccaccccaacttgcacattattgtaagctgactttccgccagcttctatgttggggcccccgcatcaactactgctatatagtcataaattaaataagtattaagaagttgaacgagtatgtcttgagtgaaatgtacaatttttgtgaaaatacgtgaaaaatcaggagtccataaatattgagcttgttatacatgtcgagtgaggtgtagacatcaatgaagcgattaagtacaacattgaaagtacgattaattagtaattttttacaattgattattacgacagcgtttatcccatttatagcattatatttaactgatatgttaaatcaatctatcgttggtatatatcttgttgtcttagtgattttgaagtttccgttatctattatttctggctatattatcgaaatatttccaaaaaaggctctcgtgttgatttatcagttgacgatggttgttatgttagtgttaatgggcatatttagctctaaccagctatggcaaatcatctgcttttgcattgcatacgctatattcactatcgtttggggcttgcaatttccagttatggatacattaattatggatgcaataacggaagatgttgaacattacatttacaaaatgagttattggattacgaacttatcggttgctatcggagctttgttaggtggattaatctatggtcatagtatgttgatacttttcttagtcgcggcatgtatttttttaattgtactggtgattttatatatttggttgccagaagaccaaaatcaatcagtacgaactgttgctaatgcgcaaacgcctttttatcaacaatttcatattttgaaagtgttgcgtagttataaattagttttaaaagatcgaaactatatgttaatgatttcaggattcagtattttaatgatgggtgaattctcaacatcttcgtatattgcaattagattaaaagatcaatttgagaccatgagcataggtccttatgatattacaggggcaaagatgttagcaattttactcatgaccaatactgttggtgtcattgtactcacgtattttatttcaaaagttgtattaaaaatagattttaaaatagctttagtgttcggtttactattttatattgtcggttatagtggaatcacgtatctcaatcaatttagcttgctcatcttattcatgatgattgctactataggtgaaatcgtttattcgcctatatttgaagagcaacgctttaaaattattccagaagataaaagagggacatatagtgcttttcatgcattaggtattcatatgtcggaaacattagcgaggttagggattgtcttgggtgtgttcttaacctccttacaaatggggttgtgtatgtttatcttgttagtaatgggtgctttgttacttgttataggtgtatttagaggacgaaagaaagtaagcatagattgaatttgctgaaacatttatttaacaagtctctttgtattgaaaacccattaatttggtcgtgattaaaatagagataaatttattaagaatttgttaaaatttaaggataacaattgttttatgcgagttgtttgtttaatataaacttgcttcatggatattttgtaacaacaatattgaatttgcaataagatatgaacaagagaaagtgattaacgagttgtagtgtgctatttatcgaatatgtatgtaatttacattgaaaaatataccaattgtaacgatgatacaagatgtattttagggtagaatatatcgcttatatgttgcgaatggtgttttatattaatcattacataacgagttaattaacatttcgtcggttatcatatcatcatgcaatttcagtaagtaatgagtattatgatatgaaagaaggactttttatgattatgggtaatttgagatttcaacaggaatattttcgtatatacaaaaataatacagaatcaacgacacaccgtaatgcgtattgggttaaactcgctaaaaatgttgaagctactaaaatgatgtatgcattatcgacaattgtgcaacaacatgcatctataagacatttttttgatgttactaccgatgacaatttaacaatgatacttcatgaatttctgccttttattgagataaaacaaattccatcttcttccgcaaactatgatttagaggctttttttaagcaagaattaagtacttaccattttaatgattcacctttattcaaatttaaattgtttcagttcgctgatgctgcatatatactattagattttcatgtgtccattttcgatggtagtcaaattgatatttttcttgatgatttatgcaatgtatatcgtggcaatactgtaattaacaatactcgacagcatgcacatttaaatagaaatgatgataaagacaatcaagatgcatcgcatatagcattagactcaaactactttcggttagagaataactctgacatccatattgatagttatttaccaattaagcatccatttgagcaagctttatatcaaacgtatttgattgatgatatgacatcaatagatatggcatcgttggctgttagtgtgtatttagctaaccatataatgagtcaacaacatgatgtcacattaggtatacatgtaccatcacatttaccaaatgatttacacggaaatattgtgccattaacgttaacaatcgatgcaaaagatgtatgtcaacgttttacaacagattttaataaaagtgtgttgcaaaatatgtcgcaattacagtgcgcgaagtcttcgctttcattagagactatttttcattgttatcatcaaatgatgccttgttgtaatgatgttattgaggatgtacatcaaatacatgatgcacatacatctttagcggatattgaaatttttccacatcaacacgggttcaaaattatatataacagtgcagcatatgatttgctctcaatcgagacgctgagtgacttagttcgtaatatttatttgcaaattactgaagaaaatggaaataaacgaacaactgtagatgaacttaatttgatgacagaacgtgatattcaattatatgacgatatcaatttaagtttgcctgagatagatgatgcgcaaacagttgttaccttatttgagcaacaagttgaagcaacgccgaatcatgtcgctgtgcaatttgacggagtgtttataacatatcaaacattgaatgcacgcgcgaatgatttagcacaccgtttgagaaaccagtacggtgttgaacctaaggatcgtgtcgctgtcatagctgaaaaaagtattgagatgataatagcgatgataggtgtgttgaaagctggtggggcttacgtgccaattgatccgaactatccaagtgatcgtcaggcgtacattttaaaagatgcaacgcctaaagttgtaataacgtaccaagctttatatgaaaatagtaaacaaaatattaatcacattgatttgaacaagatagcgtggaaaaatattgacaatctttctgaatgtaacacgttagaagatcatgcgtatgttatttacacgtcggggacaactggtaaccctaaagggacactaattccgcaccgaggtattgttcgcttggtccatcaaaatcattatgtaccattaaatgaagagacgacgattttgttatcaggaactatagcctttgatgctgctacatttgaaatatatggtgcattgctcaatggtggaaaactgattgttgctaaaaaagaacaattattaaatccaatagtgttagaacaattaatcaatgaaaatgacgttaatactatgtggttaacctcctcattatttaatcagattgctagtgaacgaatagaagtattggtaccgttaaagtatttattaattggtggagaagtattgaatgctaagtgggtagatttgcttaatcaaagaccgaagcatcctcaaattattaatggttatggaccaactgaaaatacaacatttacaacgacgtataatatacctaacaaagttccaaatcgtattcctattggtaaaccgattcttggtactcatgtttatatcatgcaaggcgagcgtcgctgtggcgttggtattcctggagaattatgtacaagtggctttgggttagctgcaggttatttaaatcagccagaattgacagcagataaatttatcaaagattcaaatataaatcagctgatgtatagaagtggtgatatcgttcgtctgttacccgatggcaacatagattatttatatcgaaaggacaaacaagttaagattcgagggtttaggattgagttgtcagaggttgagcatgcgctcgagcgtatacaaggtattaataaagctgttgttattgttcaaaatcatgatcaagatcagtatatcgttgcttattatgaagcgatgcatacattatcacataataagattaaatcacaattacgtatgaccttaccggagtacatgataccagttaattttatgcatattgagcaaattcctattactattaatgggaaattagataagaaggcattgcctatcatggactatgtcgatacggatgcctatgtagcaccgagtacagataccgaacacttgctatgtcaaatttttgcagatattttacatgtgaatcaagtaggtattcatgataatttctttgaattaggtggccattcattaaaagcaacgttagtggtgaatcggatagaggcatctactgggaaacgattacaaattggtgatttattacaaaagccaactgtatttgaactagcacaagcaattgctaaggttcaagaacaaaactatgaagtgattcctgaagctatagttaaagatgattatgtgttgagctctgcacaaaagcgtatgtatttattatggaaatcaaaccataaagatacggtgtataacgtaccttttttatggcggttatcatcagaacttaatgtagctcaattgcgacaagcagttcaacatttgatagagcgacatgagattctacgaacacaatatattgttgtagatgatgaggttcgacaacgtattgtggcagatgttgtagctgactttgaagaagttatcacgcattttacggatgaacaagaaatcatgcgccaatttgtagcaccttttaatttggaaaagccaagtcaaattagagtgagatacattagaagtccattacatgcatacctgtttatagatacacatcatatcattaatgatggtatgagcaatatacaattaatgaatgatcttaacgcactttatcaacataaattattgttaccacttaaattgcaatataaagactatagtgagtggatgtcgcatcgtgatatgacgaaacatagacaatattggttatctcaattcaaagatgaagtacctatcttaagcttaccgacagactatgttagaccaaatattaaaacgacaaatggagcaatgatgtcatttataatgaatcaacaaacgagacagctacttcaaaaatatgtagaaaagcatcaaattactgattttatgttctttatgagtgtggtcatgacgttgttaagcagatatgctcgaaaagatgatgttgttgtcggtagtgtaatgagtgcgcgtatgcataaaggcgcggagcaaatgctaggcatgtttgctaatacgttggtatatagagggcaaccgtcacctgataaaatgtggacacagtttttacaagaggttaaggaaatgagtttgggggcatacgagcatcaagaatacccattcgaatgtttagtaaatgacttagatcaatcacatgatgcctcacggaatccattatttgatgtcatgttagtactacaaaacaatgaaacgaatcatgctcattttgggcatagtaaattaacacatattcaacccaaatcggtgacggcgaaatttgatttatctttcatcattgaagaagatcgcgatgactatacaatcaatatcgagtataataccgatttatatcactcagaaacagttcgtcacatgggtaatcaatgtatgattatgattgattatattttgaagcatcaagatacactacaaatttgcgatataccaaatggcacggaggaacttctaaattgggtcaatacgcatgttaacgatcgaatgcttaatgtcccgggaaataaatctatcataagttactttaatgaagttgtctcacgacaaggtaatcatgttgcgctagtcatgaatgatttgacaatgacatatgaaacattacgcaactatgtggatgccattgcgcacatactcctatcaaatggtgtgggcaatggtcaacgggttgccttgtttacagaacgtagttttgaaatgattgcggcgatgttggcgacagttaaagtaggtgcatcttatatacctatcgatattgattttccgaaaaagcgacaaggcgcaattttggaggatgctaaagtaactgcagtcatgtcttacggcattgaaattgaaacgacattaccagtcattcaattggaaaatgctaaaggttttgttgaatcaaaggaaaatgatcaatatgatgatttacatggcgatcaacttgaaaacacagcgatgttagataatgagatgtatgctatttacacatctggtacgactgggatgcctaaaggggttgccatacgacaacgaaatttgttgaatttagtgcatgcatggtcaactgaattgcaattaggcgacaatgaagtatttttgcaacatgcaaatattgtttttgatgcatcagttatggagatttattgttgtttgttaaatggtcatacgcttgtgattccagatagagaggaacgtgttaatccagcacagttacaacaactcattaataagcatcgtgttacggtggcatcgattccattacagatgtgtagtgttatggaagacttttatattgaaaaattgattacaggcggggcaactagtacggcatcctttgttaaatatattgagaagcattgtggcaggtatttcaatgcctatggaccatctgagtcaacagtcatcacatcgtattggtcacatcaatgtggtgatttgatacctgagacgattccaattggcaaacccttatctaacatccaagtgtatattatgtcagatggtttgttatgcggtattggtatgccaggcgagttgtgtattgcaggtgatagtttagcgataggatatattaaccgtccagaattaatggctgataaatggcaaaataatccatttggtaaaggaaagttgtatcatagtggtgatttagcacgttatacatctgatggtcaaattgaatttttaggaagaatagataaacaagtgaaagttaacgggtaccgtattgaacttgatgaaattgaaaatgcaatattagctattcgtggtatatctgattgtgttgtcacagtaagtcactttgatacgcatgatatattgaatgcttattatgtcggagagcaacgagtggagcaggatttgaagcaatatttaaatgatcatctgcctaagtatatgattcctaagactataatgcatatcgattgtatgccattaaccgcgaatgacaaggtggatactacgcgtttgccaaatccatcacctatacaacagtctaataaagtgtatagcgaaccatctaatgaaattgagcagacatttgttgatgtattcggagaggtattgaaacaaaatgatgtcggtgttgacgatgatttctttgaacttggtggtaactcattagaggcgatgttagttgtctcgcatttaaaacgatttggccatcatatttcaatgcagacattatatcaatataaaaccgtgcgacagattgttaattatatgcaccaaaatcaacaatcattagttgcattaccggataatctttcggaattacaaaacatagttatgactcgttataatttgggtattttagaggatagtctaagtcatcgacctctaggaaatacactattgactggtgctacagggtttttaggtgcttatctgattgaagcactacaaggatacagtcatcgcatttattgtttcgtacgtgctgataatgaggaaatagcatggtataagttgatgacgaatttaaatgattatttttcagaagagacggttgaaatgatgttatcaaacattgaagtcattgttggtgattttgagtgtatggatgatgttgttttaccagaaaacatggatacgattattcatgcaggtgctcgtacagatcattttggtgatgatgatgaatttgaaaaagtaaatgttcaaggtactgttgatgtcatacgtttggcactacaacatcatgcaaggttaatatatgtgtctacgataagtgtgggaacttattttgatatagacacagaagatgtgacattttcagaagcggatgtctataaaggacaactactaacatcaccatatacacggagtaaattttatagtgaattaaaagtattagaagctgtaaataatggcttagatggtcggattgtacgtgttggtaatttgacgagtccttacaatgggagatggcatatgagaaatataaagactaaccgtttttcaatggtaatgaatgatttgttacaactgaattgtatcggggttagcctcgctgaaatgcctgtagatttttcttttgtggatacgactgccagacaaattgtcgcattagcacaggtcaacacaccacaaatcatttaccatgtgctatcacctaataaaatgccggtgaaatctttattagaatgcgttaagcgcaaagaaattgaactcgtcagcgatgaatcatttaatgaaattttacagaaacaagacatgtacgaaacgattggattaactagtgttgaccgtgaacaacaactagcaatgatagatacaaaattaacattaaaaataatgaatcacatcagtgaaaaatggccaacgataactaacaattggctgtatcattgggcgcaatatatcaaaacaatattcaataagtaagtagggaaagttatgacagtatttgtaatgcaattacagagtaacttgaaaagtattgaagaattaatatcacaaagtcgttggtcatataaaaaaccgcgtacagtcaactatagatacaatcaagataaactcatgcacagattgggagatattttagtgcaatatggaattcaacatgacacagggttattaccacatgaatggcattatcacatttcgccacgaggtaaggcagatatagttcaacacaatcgtgatggacagcccatctatgtgagcttatcatatagttatccttatatcgtgtgtgttgtcgataaagaaccagttggtattgatatcgaaaagatatcacaacgtttagactggcgtacattagtgacgtgtttctctacaaacgaagcacatcaaatatgtagtttaaatgatttttatcaaatatggacacaaaaagaaagttttacaaaattgattggtgaaggtttaatcaaaggattggacatttatgatatgacacaatcacacttttatcaatcacgtgaagtgaagttcaaacaatttatttttgatcagtttatggtacaggtatgtttcttaggagaggctccttggagttataaaaaattatcggtattccagctattaagtagttaacatggcgtctaacagtatcattgcgcagtgattttaaactatgctgcctaaatgtttactgttagatgtttttttattggaaaaatgaaaggtgaatacacgatggcatcattcaaaatcatgacgagattaaagtaagtgataaggtgaaaatatactgagcaatattgaaattgccaaaaataatggcttgttacgacgcatttgagactttaatgctcacgtaagttggctggaatcatatcatgtcagttaataaaataacgtgagtatcaatcatcatactcaaacgatgatttaaaactcacgttacgatgtttatatgaattaatttaatttatagcgatagacaaaatgttgtcgtactaattcaatagtcatcatccagacgacatgtccaaataattctgatatgtgctcttggaatggttgatcccacacagcaggtacagtatgcataatcggcataatgataaggtggaataacacccatattacaataccaaaaacagcaccttgtcccattgctaagtaagcgtattttttaactaatatgcagtaaataattgcaatgacgatagaaaaactaaagtggacaataaagcttacccaaggcaattccatatttgaaaatgtatatgtttgatgcgtaaactcactactaaatcctaattgttgcaataactcttgaggtgggtttgttgcatttcgttctggtgtacgaggtggaaacatgacctcccaacctaattttacaattccagataacaagccaccgataattccagcataaatgaatatacccatttgtcgtttcgtcaacttaaggactcctctctatttactatcctcattatagtattttgtgaaaataatcacaataaaaagctttgcaaaacttaaaatattttgataaacaaatttgtaaaaggttattagttttttacatctcatattgtatcatattgtattcaaaattattaacgagatgaacggtaaataaatgtttcagcgcaatggataaacgaactggaatcatcgcgtgtcaaaacttgttaggccttaatttcatagttatgaattaagtattgttgtcccaacaaaatcattattgtaaatagcttcgataatatttggcttgtttcctgatgcaatgataactttaggacagccattttcaatagcatttttagcatcaagcactttgggaatcatacctccataaatatcaccatgctcaatatactgattaatatcagctaagggtagttgaggtataacaacatcgttgattagcacgccagcaatattacttagtacataaatgggtgcttctaatgatgctgcaataaaataggcgagtgtgtctgcatttatgttgtaaaattctccatcatggttattgaaaccaatcgaattgatgataggtataaatttagtacataaataagacaatgagtctatatttaaagtggttggaaccccgacatatccatattgttgatcaaaacgtttaatttcaaataattgagcatccaaaccacataagcctattgcagaacattggcgctggttaaattgagctactaatgcagtgttaacgtctgcaatgagcgtgtgtttagtaatagtcatggttgctttatcagtcactcttaggccattaacaaagtgtggctcgatttgctggtatgataatgcttcattaataaatgggccaccgccatgaacgataatggggtagatgttgtttgatcgtaaatacttaatgttgttaataattgatggatgcatgtcacttagtgtactgccaccaattttaatgacaataaatttcatctaaccaacaccaccttatgttcgatatgatgcgttaatacgcacataatcataggataaatcacaaccgtatgcagtcgctacagcgttacctaaaccaagctgaacgtcaattgtgacattttcatgagttaatgtattcgacatagcttgctcatcaaatagtacagccatacctttatccacgacaggtatttggttcagttgaacatatgtgcagttaggatcaatttcacatccgctgtagcctatagctgtaatgattcgaccaaaattggcatcttcgccaaaaatggctgattttactagatttgaacttacgatagttttaccgatttttcttgcgtctgatattgatttagcgcctgaaacattgacactgattaactttgttgcgccttcgccatctctggctatagctttagctaaaaatgtacagacaaaattgaatgcatcaacaaatatttcccattgtggatggtcttgattaagtatttggtgttcaacttgctgatttgccatgactaataccatgtcatttgtacttgtatcgccatcaacagtaatcatattaaatgtatggtcagtcgaagattttaataattgatgaagtgtattcgattcaattgatgcatcggttgttataaaagcaagcatggtagccatatttgggtgaatcatacctgatcctttagcactgccaccaattgtaatggttttaccatcaatatttagtgatacagcgatatgctttgtacatgtatcagttgttaaaattgcctcgttaaacgcacctggtgttgtaaaattagcatcattaatatgttctgtaccagttttaattttatccattggcaaatattctccaatgaccccagttgaagcaacagcaacatgctcagatggtatttgaagttgttgagcaacccatgtttgagtttgttgtgcatcatcgataccttgctgacctgtgcaagaatttgcattagctgaattaacaacaagtgcttgtaatttccctttagacttttgtaaagtgtcttcagtgacaataagtggtgcagctttaaattggtttaaagtatatacggcagctgaacttgctaaagacgatgagtaaatccagccaaagtcttttttgttagcgcgtaaaccgatgtgcataccaccggccgtgaagccttgaggtgtactgatatcgccatgtttaataattgaaaagttatattgttgtgatgtcgtttcttgatgtttcattctaacaccccttatggataaactggtgattgttttaggccagtcgtaacttcaaaatcatataatatatttaagttttgaatggcttgaccacttgcccctttgacaaggttatcaatcactgatactaaaattgctgtttgcgttgtttcatctacatagataccgatatcgcagtagttactaccgagtacttcttttgtggttggaaaagtcccaatatctctaattctgacaaatggctgattagcataataagaggtcattaatttatgtaatgattcagtcgtatattcagatgataatttgacatatattgttgataaaatacctcgtgtcattggtactagatgtggtgtaaatatgactgatacatcttgacccgcaatgatagataaatattgcccgatttccggtttgtgtttatggtttccgattgcataagcgcttagattttcattcatttctgaaaaatgaacacgttgtgataatgaacgtccagcacctgacacgccggtcttagcatcaataataatagatgacaaatctataattttttcgctaataagtggatgtaatgctaataacgttgctgtagggaaacagccagggttagaaatgagtttcgttccattgttatctaaagattgccattctgaaatgctgtaaatagcatgatccaaatcaacttgtgctgcagcagtttctttgtaatatgcttcatatatttcacgattcttaattctaaatgcgccagataaatcgataacatgaatacctttttctactaagggagggatacatgttttacttacgggtgctggtgtcgcaaagaaaattacatcacagtcattattgtccactgtaagtgcttcgaaatgttgcataatatgttgtaaatgtggaaatgttaatttcaacggttcatctacttttgaatgtgagtagatgtgtgcaatcgttacatgaggatgtgtttgtaataatcgaattaattcaattgcgccataaccgctaccgccaacgatacctactttaatcatcatgaatccctcctatatcatatataaatgattaattgttaatttttaaaaacgtcttgaaaagctgcaacaatttgattgatttcctctttatcaatgactagaggtggtgacaatcgaatgatagtacgatgcgtgtctttgcataagattccacgttgaatcagttgatccacaaaaggtgcagcatctgtgttaagctctatgcctataaataaaccacggcctctaatttctttaatactaggatgtttaagttgtagcaacgcttttaataaaaatgaacctaagcgttctgatcgttcaaccagttgttcatctttaagtacatcaagcgctgccgtcgatattgcaatggctaaagggttaccaccaaatgttgaaccatgtgtacctggtgttagaacacgcatgacatcattatttgcaagtacagcagatacagggtataagccgccacccaatgccttacctaaaatataaatgtctggaacaacttgctcccattccatagcaaaccatttcccagttctaccaagaccaacttgaatttcatctgcaatcaataatatttgatgtttatcacatagttgacgcacagcttgaatatatcctttcggtggtatattaacgccaccttcaccttgaattggttccaaaataattgctgctgtattcggtgaaatagcttgtgttaattgttcaatgtctccaaaatctactgttgtagtgccttgaagtagggggtgaaatcctgctttatatgcgtcgtggttagatagtgataacgagccaagtgtacgaccgtgaaaattgttattcatagcgatgatttcaacttgtccgtcagtaatgcctttaacttcagagccccattttctagcaattttaatggctgcttcaacagcttcagtaccagagttaagggggagtactttgtctttcttagcaagatgacaaattttttcttcccatttcccgagattgtcactataaaggacacgtgaaatgatagacaactttgaagcttgttctgtcatcgctttaacaattgttggatgacaatggccttggtttgcaactgaaaaacccgaaatgcaatctatatattgtttgccatcagtatcccaaactttgacacctttacctttagtaattacaagcttaagtggtgcataattattagaactataataatcagttaattcaatgattgaattcatcggtctccctcctttatatttatacaatttaaagaattaatattaatatattacagttgttcaatataagtgtcaaatgtaaatttaataatataaagataaagttgtgtatgtattaatgtggttcgtaaaatgaaagtactaatatttttcgtggataatcattaatatgtatgtatacgagtgcagtttaatgtagtatgaataaaaaatgccacaagcatatgtttaacatatgactgtggcatagtattatgcttgtggaattttacgatgcttaattttataaataatgaagccgataatgaaaccaatcaaactgagaacaaaccagcccataccaatgtctgataatggtaaatatttttggctgaaattaatcaaagtttgtgagaatgatgtgcttgaaatgaactctggactagcttttaatccatctactaatgcagcaatcattgtaaagaaaatggtacattgataaataatttttgaatgatggaatttgctactaaataatgttagtacaatcaaggcaattgctaatggatataagaacattaacactgggactgagtacataataattttagttaagccaacattcgcgaataagaatgagataaagctcacaactgttgcaatcgctaggtaattcattttagggaaaaggtgttcaaatgtttctgaaaatgccgtaattaaaccgatagctgtttttaaacaagcaaccataacgatgagtgataacaagacgataccgtagttacctaagtagtattgcgtaatttgcgctaaggcaataccaccattttcactaagtttgaaatgaccaatacttaatgtacccatgattgctagtagggtataaatgatccccatcataatgatactgatagtaccagacttaattgtttctttagcgatatcagttggattttcgatacctaactttttaatcgttgcaacaatgatgataccaaatgccaatgacgctagcgcatctaaggtattgtatccatctaaaaagccgttaaataaggcgtttgattgatattgtttactaataggtgcatcagatatgccacctaatggatggataaaagcaaataataaaataattgctaataatactaagaatactggatttaaaaatttaccgatatattctaaaattcttgatggctttctcgcaaaaaaccatgcaatcacaaagaagacgaagctaaaaataaataaatataaagtgatttgctttggtgataaaaatggcgaaaatgcaatttcaaatgatgtagttgccagtctaggtaaggcgaaaaatggtccgataactagatataaggcaatcgtgaaaatataagcatatgttttattaacacgcgatgcaatttcaaataaaccagatgtctttgaaatgccaatagcaatgatacctagaaatggtaagccaattgctgtaattaaaaatcctaagttagcgataaaaacgttagaaccagcagcttgacccaagtgtattgggaagataagattgccggcaccaaagaataatccaaataacatagaacctataaacatgttttctttaaatgttagtttcttcttcatatatgtatttgttctcctttttagaacttataaaaatctacttaattaagataatatcaaaaattaaacctaaagtgatacataattttgtaataaatactaaattttttgaaaattccggaataaacactgtttttatgtagtaggggcgtaggttaagaacggtttaacagatatagaatatgttaaatatagaaggttagacaacccgacgtattaatactttgtaaaataaagatacccccttcaatatgatcgaagggggtaagtgtatgcttagttcaatatatttagtaagtcgcttgtggttactgtttgccccattatagggaataaattatctattgggaattgatgtagcgtttcgttttgagcgctcatcatgtcagtaacaaaatactgatcgtagtttaattgataggcgtctcgtgctgtcgtatctacaccaacatgtgttgctacaccgccaagaacaatcgtatcaattcctcgacgtctcaactgtaagtctaaattcgttcctacaaatgcactaaattgtcgtttgtctatgacaaaatctccatctctcttgtctaataaatgatggaaacgactgtagtcgtcgcattcttttggtggtaatgataccatcgaatttggtttcaatgcatctttaccatcatagaatttaacacgaacgaatacgataaaaccattgttttttctgaaaacatctattaatttattagcgttttgaacgacattttcagcagtgtatggggcataatccattttaagaataccttcttgcaggtcgattaacactaaagcggttttattaaaattaatcatcttatatcagagtccttttcgtttaataaagtatctgttaaagcttataccctgtataagatgaaattatttattttgttgcgaaaaagctttagcgatatcgatcagtttctttggtgcatcttcgacagacattttgacttcgacaaaatgcatcacatcgggatgaccattaattgcattaaacgtgtcttgtaaatcttttgatgattcaacgtcatgaatttcaacatttttaccaccaaatacagctggtaaagctttataatcccacatgtgaatttcattataaggttcatacatgccgtgaataagtcgttctaccgtataaccgtcattattaatcacaaataataccggtttaatatgctgtctaatcatagttgaaatagcttgaacagttagttgcaatgagccatcaccaattaataataagttacgacgatctttgtctgctaattgtgaacctaatgttgcaggtaatgtatagccgatagaaccccataacggttgccctataaaagtattgtttttgtataatgctaaatcataagcaccaaagaatgacgtaccttgatcagcaataatgacatcatttggttttaagaaattttgcatcattttaaaataagtttgttgtgttaatggctctgtgccaacagtataatcgggtgatgttggacgatgataagcagggaacgctgcgttattcgtatatgatatatcggtcaattgttgtagtaatgatggtagagatatttcatcatttgtaacatcatcaattttgatattgtgatgatttaacataacgacatcatcgatattgaattggtatgaaaatcctgctgttgctgaatctgttaatttggctccaatatttaaaattaaatcgctgttgtccacataatctcgtattttatcttcggcaattttcccatcgtaaatacccatataatatggattttcctcattaaaagcaccttttcctaatgaaagttgtgctactggtatctgtgtttgatttacaaaatcttctaattcttgatggaggtgaaaactgttaatttcatgtccagtaatgatgataggctgcttcgattgatgcaatttagatgctaataactctatatatgttgacgcatcagtatctttggctgctgttacttcgaatggtgtcggtatttcaatttcagagattgcgacatcgattggtaaatgtaaatgaactgggcgtctttcggcgattgctgtattaattaaacgtggtatttcggttgttgcattttcaggtgtgatataaccttgtgcaacggttatatgtgcaaacatttttcggtagtcgtcaaatgtaccttcaccaagtgagtgatgtacatatttaccggcttgttcaacagcacgtgtcggcgcacctgtaatcgcaatgacaggtatgcgttcagcatacgaacctgcgataccgttgacggcacttaattcgccaacaccaaatgtagtaactaatgcagcgagtccattaagacgggcataaccgtccgctgcgtaacttgcgtttaattcatttgtatttcctacccaatctacattgggattactgataatatcgtctagaaaagcgagattaaaatcaccaggaacaccaaaaattttatcgacgcctgctcgatgaatagcgtcaattaagtaagctccaatgcgttgtttcataaaaaaaccaccttttctctatatttacacttaaaatgatagcctcgaatatagtgtaaggtcaaggaagttgactttgttgtgaaaacgctaacaatagtgagcaattaatattttttaggaaatgagtatgaagggggatttaattgatgatcttaaaattcaaaatttaaggggagagcgaactatcaatgatgctgcaaaacacaatagcaatgaaaaaacaggcgcgtcaccttatgaaggtatacgcacctgtttatagtaagcattatttagcttcaaataattgatcgccaaatgaaatgttgccatgttcaccttgtttaaaatcaaggtttgtaatgtttccttgtgtaacgataataggcgtaatatcactctttgcatgattgcggatgtagtctaaatcaaagttgattaataaatcaccttgtttaacttcttgaccttcctcaacatgtaaagtaaagccttctccgtttaatttaacagtgtctaaaccgatgtggattaatagttctaaaccactatctgatacaagaccaattgcatgttttgttgggaaaatcatttgtactttaccgttgaatggtgcacgaacttcaccttgtgaaggtttgatagcgataccgtcacccatcattttttcgctgaacacttgatcaggcacttctgataatggtgttacttcaccagttaatggtgcatgaacgatatggctcaattcgcttgttgcagatttatcttctgcaacaacaacagtttcgtctttatcgtcttccatagtagtagggttttctactacttgaccattcataatctgttgcatttcatgtttgatttggtcagatttaggaccaaaaattgcttgcatattattgccgacttctaatacaccagatgcgcctaaatctttcaaaccaggaacatcaactttagatttgtcgttaacttcaacacgtagacgtgtgatacaagcgtctaaatgtttaatgtttgctttgccacccatagcttctaatactgcatatggtaattcagttgctgaagcagtaacagcttgtgattgcttatcttcacgacctggtgttttgtattttaattttacaattaagaatcggaatacgaagtagtaaatgactgcgtatacaagacctacaggaataactaaccaccattgtgtcttattaggtagtacgccaagtaaaacgtagtcgatgaaaccacctgagaatgtataacctagatgaacatccaataagtacaatgttaagaatgataaaccatcaagtactgcgtgaataaagaataataatggtgctacgaataagaatgagaattctaaaggttctgtaataccagttaagaatgatgttaaagcagcagaacccattaaacctgctactactttcttgttttcaggtttagctgagtgataaattgctaaagctgctgcaggtaaaccgaacatcataactgggaattcaccttgcatgaatttaccagctgtcaaatgtgcgccttcacgaatttgttcgataaagatacgttggtcaccgtgaataatttcaccagctgcatttttccatgaaccaaactcgaaccagaacggtgcgtggaaaatgtgatgtagaccgaatggaattaataaacgcttaataaaaccaaataagaatacggcaacaccagtatttgagtctaataatcctgtgctgaatgcatttaatcctgtttggattgttggccagattaatgccattgggaatgctaaaataaatgatgttgtagccatcataataggtacgaaacgcttaccagcgaagaaacctaaataagatggtaagttaatgttatagaacttgttataacaccaagctgccagggccccgataataataccgccgaacacacctgtttgtaatgttggaatacctaaaatgctagcgtaaccactcgctggatcagtaacatttttaggtgtaacttgtaaaaagtcacccattgttttgttcatgattatgtaaccgacaaatgctgcgatagctgctacgccatcaccgccagctaatccgattgcgacacctaatgcgaaaatcataggtaagttttcaaaaataatactaccggctgctgtcattaatttagcgacattttgaacgccaccattttgtataaaaggcaagtagtgttgtaatgcttcgccttgtatagctgtaccgatagctaataacagacccgctgctggtaaaattgcaacaggtaacattagtgccttaccaatacgttgcaattgaccgaaaagtttcttcctcacttgtccaacctccaaagttgtatttattatttaagattcaataaaaaagacacgagcaaatagactgtgttggtaaccatcacagcttaatttaactcatgcctaatcttacttagtaacacgttggtgtatgtaattaatgtaaaagaagcaattgactaagtagtatataaaactgatacgttagtttatctagcttaccatcacatcttattgaatcttatttgtttgcgactcctattttagcatggtgaagtatgcgttttcaatacaattattaaattcaatttcaaatctcttaattgttcacagattattattaaaacataatataagataatcctgaataaaatgtataaaagttgttgtaataatccagcagtagcagctattatcagcacttaaaagaaaaggataatctttgatggtataataattaacttgtgacagaaatatgtaagattattacaatgaacaggcttcaactgattaatattgtaatgtgttttctcttatagtaaaatgtaagcgattacacaactcaactatattttcctaataattatattgttaaggagggctactttgacaggcttttcagtgtatttaggacaacctttagatgaagcgtatattaagcgaatgattaaacaaggttaccaaatgatttttacatctgtacaaataccagaagaagatgacgagacaaaatatcattatttcacaaaactactcaatttattaaaacatgaacaagtgacttacctcatagatgctaatccatctatattaacaccatctttttatgagcatcttcgacaatatgatgcacaatttatgattcgtatcgatcatagtacatcaattgaggcaatcgaagcgataatggcacagggtttaaagtgctgtttgaatgcaagtattatttcccgggaattgttaacaagcttacatcaacaattgaatgattttacattactttcattttgtcataactattatccaagaccagatacgggattatctgttgacttggtcaataagaaaaatgaactcatttatcaatttaatccaaaggcacaaatatatggttttattgtagggagtggtttgcgaggtcctttgcataaaggcttgccaacaattgaagcaacgagacatagtcatcctgtcgttgcagctaaattattacaagaaactggtgtatctgaagtgttagttggagactcattgattgaaatgaggcaggcaaaacaacttatagatttttgcaagcataggcatttcacgttatgtattgaagaagtgtttgatacgacagtgacttaccttttcgatatgtgtcataaagtacgtccggataatccggaaaatgtcattcgttcggaaacgtcaatacaaatatgtctacattcgattcaaccacagtttacaacgcaacgacgcattggttcggtaaccgttgataatttgaataacggacgttatcaaggtgaaatgcaaattgtgagacaaacgcttagtgcacatgacaatgtgaatgttgttgcacaaattattaaagaagacttaccactgttaagttgtatcgagccgaatgatacatttgattttcaaaaaactagggagtgtaagaagtgatggaaaatagtacgaccgaagcgcgtaatgaagcgacgatgcatcttgatgaaatgactgtggaagaggctttaattacgatgaataaagaagatcagcaagtcccgttagcagttcaaaaggcaataccacaattgacaaaagtaattaaaaaaacaattgcacagtataaaaagggtggacgattgatctatatcggtgcaggtacaagtggaagattgggtgtcttagatgcagcggagtgtgtacctacattcaatactgaccctcatgaaattataggtattattgctggtggacaacatgctatgacaatggctgtagaaggtgcggaagatcacaaaaaattagcggaagaagatttgaaaaatatagatttaacatcaaaagatgtcgttataggaattgccgcgagtggcaaaacgccatatgttataggcggtttaacatttgctaacacaatcggtgctacaacagtatctatttcatgcaatgaacatgcagttataagtgaaattgcgcagtatccagtagaagttaaagttggtccagaagtattaactggttcaacgcgtttaaagtctggtacagcacaaaaattaattttaaatatgatttcaaccatcacaatggttggggtcggaaaagtttacgataacctcatgattgatgttaaagcaaccaatcaaaaactgatcgaccgttcagtgcgtattattcaagaaatatgtgctatcacatatgatgaagcaatggcgttatatcaggtatctgagcatgatgtgaaagttgcgacagttatgggtatgtgtggcatttctaaggaagaagcaacaagacggttattaaacaatggtgacattgttaaacgagcaatcagagatagacaaccttaggagggatttaaatgaccaaagaacaacaacttgcagaacgaattattgctgcagtaggtggtatggataatatagatagtgtcatgaactgtatgacacgtgtgcgtattaaagtgttagatgaaaataaagtagatgaccaagaactaaggcacattgatggtgtcatgggtgttatacacgatgaacgcattcaagttgtggttggacctggtacagtcaataaagtggctaatcatatggcggaattaagtggtgttaaactaggtgacccaataccacacaatcacaatgatagtgaaaaaatggactataaatcatatgcagctgataaagcaaaggcgaataaagaagcacataaagcaaaacaaaagaatggtaagttgaataaagtattgaaatcaattgccaatatctttataccgttgattcctgcatttattggagctggattaattggtggtattgcagcagtactgagtaacttaatggtggcaggctatatttcaggtgcttggattacgcaacttataacagtatttaatgtcattaaagacggtatgttagcatacttagctattttcactggtattaatgcggctaaagaatttggtgcgacaccaggacttggtggcgtgattggtggtacaacgttattaacgggtattgctggtaaaaatattttaatgaatgtcttcactggagaaccattgcaacctgggcaaggtgggattattggcgttatttttgctgtttggattttaagtattgtcgaaaagagattgcataaaattgtgccaaatgcgattgatattattgtaacgccgactattgcattgttgattgtaggactattaactatctttatctttatgccattagcaggttttgtttcagacagtttagtttcagtagttaacggaattattagtattggtggcgtatttagtggatttatcattggtgcaagcttcctaccgttagttatgttaggacttcatcatatttttacgccaattcatatagaaatgattaaccaatctggtgctacttacttattgccaatagcagcgatggctggtgctggacaagtaggtgccgcattagcactttgggtaagatgtaaacgcaacacaacattacgtaatactttaaaaggtgcattgccagttggtttcctaggtattggagaaccattaatctatggtgtgactttgccattaggtcgacctttcttaactgcttgtattggcggtggtattggtggcgctgtaataggtggaattggacatgttggtgccaaagcaataggcccaagtggtgtgtcactattaccattaatttcagataatatgtatttaggttatattgcaggattacttgctgcgtatgctggtggattcgtttgtacatatttatttggaacgacaaaggcgatgcgacagacagatttgttgggtgattaatgatgacaaatattttatatcgcattgataagcagttgagtgattttacgaagacagaaaagataatcgctgattacattttaaagaatccacataaaatcattgatatgactgtgaatgatttggcagatgttacgaatgttagtacagcatcaattgttagatttagtcggaaaatgacacatcaaggttttcaagagctaaagattgcgatatctcgatacttacccgaagatattgcaaccaatccacatttagaattgattgaaaatgaatctgtagaaactttgaaaaataaaatgattgctagagcaacgaatacgatgcgatttgtagctactaatattatggatgcgcaaattgatgcaatttgtgatgtgttgaaaaatgccaggacaatatttttatttggatttggcgcatcgagtttgactattggtgatctttttcaaaagttatctcgtattggcttaaatgtcaggttattacatgaaacacatttacttgtgtcaacatttgcgacgcatgatgatagagattgtatgatttttgtgacgaatcaaggtagtcatagtgaattgcagtcaattgcacaggtggccacacattacagtattcccatcataactatatctagtacagctaataatccagtggctcaaattgcagactatgcattgatttatggcagaactgatgaaaatgaaatgcgtatggcggctacaacgtcactatttgcacagttattcacggtagatatattgtactatcgatttgtagcattaaattatcatgcgattctagattgtataacccaatcgaaaatggcacttgataattacaggaagcatcttgcgacgatagattttaaacattagatattgtgtgcgttctaatataaagttagttgcaacgtaaacaattgaagtttttgatgtgattcagttgcttgatgaaaaattgttgatacaagtttgtaaaactggcatagaggctattttgaaaatgataaaggcgtgacaaattaaagcaaagttcagatttgagctttgcttttttcatagtatagaaattaaatgctgttattaagggggaattaatttggaacttaacgagatgattaattttgtaaaagaaaacaataagataattgttactttatcgctaacaattttcacgtctgtaatatttcctgagttaaaaagttggtattcaaaaatcattaatactgaaaacaaatatagaatattcgatagggcaattattatgattggcacagtgttaccaatgtattttcttttaggatttttgaattataaaatatatattaaactgctagaaagacctcatagtgaatttattaatacaatatggttttcattaataggcataagttatggattaatcttatttatagctatttcaacttaccgaaattatttagcgattgttaatagatttcaattatataaaatgtgtggaaattgtgattacatacatccctataggtttgttgtaaataaagaaagtacattaattaaagattgttttaaagttggcaataatgacctttacgaacctggatcaaactacaaaataattaacctaaatcaaaccatatatggacactatgaaaaagttgaaagtttttatcaaaataaaaacgacaaaatattccatatcattacgctaaatagaaaaaacttaataagaagttggctttttataaataattggtctattattttatgtcgttttacaatgccgatagtgttcactttatttattttttctttatcctattttgataatggcatttataatgcttttattccaattgtgatatacattttcacttttgtttttcaatcaatcatattcaataaaatatatacagagaacaaacaattgaggacgcaatatattcaaaagttgaactctggcatagaagtataaaaatataaagaatagtgtgtgttggtgtttttaggatgtcacttacctcaaagacaaatattaaaagataagacaataaaattagaataaatttacgtttgaagataaaaaacaaacatttttcattaaagtttatgatatatttagagcaatagaaagtgtacggaaggggatatgaatggcataccaaagtgaatacgcattagaaaatgaaatgatgaatcaacttgaacaattgggttacgaaagagtaacgatacgtgataataagcaattgcttgataattttagaacgattttaaatgagcgtcatgcggacaaattagaaggcaatcccttaacagataaagaatttcaacgtctgttaacgatgattgatgggaaaagtattttcgagagtgcccgtattttacgtgataaattaccacttagacgtgatgatgagtctgagatttatttgtcgtttttagatacgaaaagttggtgtaaaaataagtttcaagtgacgaatcaagtatcggtcgaggatacatataaagcacgttatgatgtaacgatattaatcaatggactaccccttgtccaagttgaattgaaacgtcgaggcattgatattaatgaggcgtttaaccaagtaaaacgttaccgtaaacaaaattacacaggcttattccgctacatacaaatgtttatcattagtaatggtgttgaaacgcgatacttttctaataatgatagcgaactattgaagagtcacatgttttattggagtgataaacagaataaccgaatcaatacattgcaatcgtttgctgagtcatttatgagaccttgtcaattagctaagatgatatcgcgctatatgattattaatgaaacagatagaatactgatggcaatgcgtccgtatcaagtgtatgcggtagaatcacttattcaacaagcgactgagacagggaataatggatatgtatggcatacaactggaagtggtaagacgttgacttcttttaaagcgagtcagattttatcacagcaagatgacattaagaaagttatctttttggttgaccgtaaagacttggatagtcaaacagaagaggaatttaataaatttgctaagggtgctgtagacaaaacttttaatacctcgcaactggtacgccaactaaatgataaaagtttgccacttattgtaacgacgattcaaaaaatggctaaagcgattcaaggtaatgcccatttattaaaacagtataaaacgaataaagttgtatttattattgatgagtgtcatcgcagtcaatttggtgacatgcatcgtttagttaaacaacatttcaaaaatgcccaatactttgggttcactggtacgccacgtttcccagaaaatagtagtcaagatggtagaacaactgcagatattttcggtagatgcttacatacgtatttaattagagatgctattcatgatggtaatgtacttggtttctcagttgactatattaatacttttaaaaataaagctttaaaagtagaggataacagcatggttgaagcaattgatactgaagaagtctggttagcggataaacgtgtggaattagtaacacgacatatcatcaataatcatgataaatatacacgtaatcgtcaatattcaagtatatttacagttcaaagtattcacgcgcttattaaatattatgagacatttaagcgacttaacaaaaagttggaacaaccattaacggtagctggtatatttacgtttaaacctaatgaagatgatcgtgatggtgaagtgccatatcattcgcgtgaaaaattagagaaaatgattagtgattataataaaaagttcgagacgaatttttcaacagacacgactaatgagtattttaatcatatttcaaaaaacgttaaaaagggcgttaaagatagtaaaattgatattttaatcgttgttaatatgttcttaactggttttgatagtaaagtactgaacactttatatgttgataagaatttaatgtatcatgatttaattcaagcgtattcacgtacaaatagggttgaaaaagaatcaaagccatttggtaaaattgtaaactatcgtgacttgaaaaaagagacagacgatgcactgagagtattctcacaaacaaatgatacggatacaattttaatgcgtagttatgaagagtataaaaaagaatttatggacgcttatcgtgagcttaaaatgattgtgccgacaccacacatggttgatgacattcaagatgaagaagagctaaagcgctttgttgaagcttatcgtttattagctaaaataatattacgtttaaaagcatttgacgagtttgagtttacaattgatgagattggaatggatgaacaagagaatgaagactataaaagtaaatatttagctgtgtacgatcaagtaaaaagagcgacggctgagaaaaataaagtatccattttaaatgatattgatttcgaaatagaaatgatgcgtaatgatacgattaatgtgaattatattatgaatatattgagacaaattgatcttgaagacaaagcggaacaacgtcgtaaccaagaacaaattagacgtattttagatcatgcagatgatccgacattgaggttaaaacgagatctaattagagaattcatcgacaatgttgtaccttctttaaataaggatgatgatatcgatcaagaatatgttaatttcgaaagtattaaaaaagaagcggagttcaaaggatttgctggagagagatctatcgatgaacaagccctaaaaacaatttcaaatgactaccagtatagtggtgttgtaaacccacatcaccttaaaaaaatgattggtgatttgccattgaaagaaaaacgtaaagcaagaaaagccattgaatctttcgtggcagaaacaactgaaaaatacggtgtgtaatgattcagccccctcgctagattagtgtaggggggcattattattttctatattttgttagttaccatgtgtttggcaatcatcatttggtttcaatacaattttatcatcgtatgtgtatagaaataatgtctataggcatttaaaatagtttataatattaacaggataagtattaaatgtatgttgaaggaggtgcgtagctatggataatagaaatatgattaatcgtgtttttagtcaaaagatattacatcaaattgcaatcaaaaataaaagtgatgttgttgatgaggtatatgatttttatatacagggacctaaaaatatcaatgtaatacagaagatgaaatctttatataattatcttaaaaagtcttatcgtaacgaatatttttacaaaaacacaatgcttaataaactccttctaggacgacattctgttaatacaactactgcactttctgagatgcccatagggaaaagtattgctgattttatattgttaaacggcaaaggtgttgtctatgagattaaaacagaattagataagctggatagattagataatcaaattaatgattattatgaagtgtttaattatgtcgtagtcattacaaatgacaaacatctgaataaagttatggctagatacaaagatacaacagttggaattttagtgttaactactagaaatactctgagtgaagttcaaaaacctaaagaaaacaatagtctcttaaacacaaaagcgatgtacaactttttacgaaaagaagaaagaaaaagagttattgcacaaaatcatatggatgtgccaacttataatgatttcacagagtatgatgtgttatttgacgtgtttaaagaaataccaatgacgaaactgcataacaatatgatttctgagttgaaaaaaagaggcaacatgaaagaatacaaagatgaatttttagcagctccgactgaaattaagttcttgttatatttcgcaaaaatgacaaagaaagataaaaataaactatatcattttcttaaggaggattaatatgtattatccttatttgcgtgggaaacaaaatgaactatttgcaattagagaattgttagagaaaggtttgattggtgattgtattcaacctataattgaaccaattaaatatacaaccacatttaaaaatactttgcaatactgtggtgaaaaagcattctctataaatttagtagtaaattcaaagttaactgaagaagagattagtaacgaaactgttgaacatttaactgaaataataacaaaaaacaaaagtgttattcaaaaagcttacttgggtccttctgatgaaggcaatgataggttgaaacagcaattttcaagtaatagtttagctattttaacaagtgtagatgactgggaaatgtttggagataaaaataaacttgaaatggtttttgtaccagatgatagacacattaaacgtaaattgcgtaatattccaaacaaaggcatcattatggatccttttaataaactaagtcgtaatgttgattatttagataatgatgacgagttttatagcgacgatcacctttattataaggaagatggatacgtagcattttcagactattctgttataggtggagaatatgtagacggtggcttttcgccattagctattgcgatacatattgtctattttgatgaggctaatgagttaagagttaaacattttgtctctgattctaataacgatagattaaatccagctaaaaagttttttgaggctgtagataaattagtaacttggtctaaaaacttagataataaaaatagatcttatgcgatcggacaattcgaagaattaaatgaaaataataagtatccaggattaggtttaattaaaaggttatctatcatgcatcatctagaaattatgaatagatacttggagtctcaaaatgaaaatatgtgaaaaatgttttaataatactgaaatcatagaaatcattgtaaatgataatagcaaatttgacaattgtgatattgataacgatcatcttggtgttaaaatatttgatacgactcgacacatagataaattagagcagattagagattatttaagaccagcgttagaattatatgatattagtataaatttaccagatacttttagcccaaaagaaggtaaaaaaattgaaacagcattaaaagatgattggagtatatttaatgttgaagaagataaaataagttgtattttaaatgaactttttaaagatgatgaaaatatagatagacgggtgttggaaggtttagtaggcgctaaaatcattaaagataaaaaatatacaaatgaaaatctaattgtagcaaataatgactgggatggattttgtgagagcttgaagtataaaaatagatttcataataatatgatcaatttagagaatttagcgttctttctcgatatcactactaattactatagtattgaggaatttagagaaagatttgaaccattatatagatctagaatagttaagttcattacagagaaaagtgaactaatgtcaccaccaaagggatttgcaacggcaggaagattgaattctaaatggataagcgtattataccttagtacaaaagaacaggtcagtatagaagaagttaaacctaagcataatgacattatttatataggtaaggttaagttacaaaaaaacgttacaaaagagaaattgaaaattgcgaatttaactaatttaactagtaatgcaatcaaagctggcgatgatggatttagaaagtattttgtaaattaccaaacattaaaaaagattcataaaggaataacaaatccaagcgatgaacaaggaatagattatttgccatttcaatatttagctgattatattcgaagccttaaatatgacgggataatgtatgagagcatattgcaagatggtacttttaactttgtgttttttgatcaaaatttatttgaatgtgttaattatgaaagaaaaagagtaagtgacgttaaatatacattgactaagctaagttgacacacttaaaagtctgaatattctaataaaatgcaaataatcccccgcacttcacatagtggcgggggatttattatggcgtcaaaatgcccagagtatgggtgtgacccttaaatcatggcaaagcatctaacacttgatatggtgccgaatcctaacatagcacaatatagttagtatgacaaagtcatctaacataacacatcagaagttgcccgatttattccagaccatacagtgatatagttgcacaacgcatgacttttatttagcaataactgctacttctgaaataagttgctttgcatagtctgattgcggatgtttgataatatcttctgtgttattcagttcaacgatttcgccatttttcataactgcaactcgatcacatatttcattgataacacccatgtcatgtgtgatgaataaataagtgatgccgaagtctaactgtaattgttttaataactcgatgatatctttttgaattgaaacgtctaaagctgacactgcctcgtcgcaaacaatcactttaggttctacagcaagtgctctcgcgatacttacacgctggcgttgcccaccagataattcgtgtggatagcgatataagaaactttgatctaggccaactttttctaacaacgatacgacagttttaataatgtcatcattatctttgactttcccatgaatgataagtggtcgtttaatcacatcaatgactttaaatcttggattaatagatgcgaatggatcttggaaaatcatttgtatctcttgtcgtaaagatttcaattcatcatctttaaataaacttaatggtaattcgttataccaaataaagccttctgacacttcctttagaccgacgaccgtcttagctaatgtcgatttccctgaccctgattcaccgacaatgcctaatgtttcgccttttctaatagccaagttaatatcactaactgctcggtataggctgccactcggtgaagtgtaatccacgctcacgcgatcgaattttaataaaatatcattgtttaacggtcttggcggacgcgtttgatgaatatcaggaatcgcatctattaagcgtttcgtataggtatgttgtggcgatttaaaaatactttcaaccgtgccactttcaacgacacttccatctttcattacaatcatatcgtcgcaaaattgatacacagcacctaaatcgtgagtgataaaaataatagacgtttctgtgtactcataaagggacttcattaactgcagtaattgattttgtgtactggcatctaatgccgttgttggttcatctgcgattaaaatttgtggctttaaaatcaatgccattgctatcatgacacgttgacgcataccaccagaaagttcatgtggataagcatcaaattgtcgagttgcatgttttatacctactttttctaaaatgtctattgtcatcgactttgcttcagatttagatacacgtttatgttgaaatagtacttctgtaatttgtttgccaatcgttaatcttggattcaacgaagagagtggatcttgaaaaatcattgaaatatccttacctcgaatttgttgtaacgctgaagttgataaattagttaacgattgcccattaaaaataatttctcctgttaacgtgtgatctggataatctggtagtagccctaaaatagatttagcggtaatactttttcctgatcctgattcaccaacaatacctaggatatgtttttttcgtaattcgaaagagacgttttttaccgcttgaactgtagtttcatcataattgaattgtacattcagactgttgacttctaataaatttgacatgatgttgtgcctccctattcacaaatgtgtaaatttattctatacttttgtatatcatagtaatctactcaagattattttacaaggagtgattatcataattacttatttagaatcttttaagtcgttgtatcacaaggcattttacaagtttgtattatcggtattaagcttgccaatatttttatatgcagtgataaagtttttcttttctgctaagagaaaaaatttttacgctaataattctgaaatttcagaaattgaacaggcgttacatcaaaaatataaatatttatcgcagcaaaagtcatccacacaaatacataaagaagcattaaaaatattcaaggcacaaagttctaatacgaattcaaagaatattgaacaagcacatttttcaacatactttgaaaatgtattatttcataagttcatcattatcaaagtgatattggccttgccgatgttcatcttattgactatttatttacagccattagttagatatatttttgagcgaattgtcatggctgtgattgtcatcattggtgttattgtcagtgtgtttaccattctgtatttttcaccgcttgatgcggcttatagcatactgggacaaaatgcaacaaaggcacagatacatcaattcaatgtattacatcatcttaacgaaccttattttattcaattgtgggataccatcaagggtgtttttacttttgacttaggtacgacttacaaagggaatgaggttgtgactaaagcagttggcgaaagaattccaattacaataattgtcgcagtattagcgctaattgtggcattaattattgcgataccaattggaattatcagtgcgatgaagcgaaatagttggcttgatatcacgttaatgataattgcattaattggtttatctattccaagtttctggcaagggttattattcattttagcgttctcattgaaattggatattttgccaccatcttatatgccagaacatccaatatcgttgattttacctgtacttgtcattggaacaagtattgctgcttctatcacgcgtatgacaaggtcttctgtacttgaagtaatgcgcagcgattatgttttaactgcttatgcaaaaggattatcgacgacacaagtagttattaaacatattttgaaaaatgccattattccaattgtaacgctagttggtcttctagtggcagagttactaggcggttcagcagtgacggaacaagtatttaacattaatggtatcggtcgttatatcgtccaaaaacaactaatacctgatattccagcagtcatgggtggggtcgtatatatatcaattgtaatatctttagcaaacttaattattgatatattttatgctttaatcgatccaaaattacgtagtgaaattaacgaaaggaagtgaggcatatggtaaaacttacaacaaagatagcttccttaaaactattcgcaagttatgctattgcaacttatattttagttatattaacgagtgcattaaatctttttaaaggttatgtggccgatacgttctatattgctgaaacattactaatcgttttaaccatcattttaattatcattttaacaacggaacaaacatggaagcatcatgacctatggcgacgtatcgtcgaagtgttgttattgttgatgacattaacaggcaacgtatttacattattaatgtttgtaagtattagacgttaccaacgtacatcgcaaatacatagttataacgggtgggaatcgtttatacgaaaaactactagacatcgtattgcgattatcgggttacttattttagtctacatgctgacattatcaattgtgtcacaatttacatttgatacgacattggctactaaaaatcagttcaatgcactgttacatggaccgagtctagcctatccgtttggtactgatgatttcggtagagacttatttacacgcgtagttgtcggaacgaaactgacattttcaatttcaattatttcagtagttattgcagttatttttggtgtgttactaggcactatcgcaggttattttaatcatattgataatttaataatgcgaattttagatgtagtgtttgcaattccctcattattgttagcggtggcaattattgcatcatttggagcaagtattccaaatttaattattgctttaagtatcggtaatataccatcatttgcacggacaatgcgtgccagtgttttagaaattaaacgcatggaatatgtagatgcagcacgtatcactggtgaaaacacttggaatatcatatggcgttatattttaccgaatgcgattgcgcctatgattgtacgtttttcattaaatataggtgtggttgtattaacaacaagtagtttaagtttcctaggacttggtgttgcacctgatgtagctgaatggggcaacattttacgtaccggtagtaactacttggaaacgcacagtaatttagctattgtacctggtatttgtattatgttcgtcgttttagcatttaattttataggtgatgcagtgcgtgatgcactagatccaagaattcattaaaaaggtagggatagatgtgaagaaaatcattagtatcgcaattatagttttagcgttggtattaagtggttgtggtgtccctacgaaatcagaagtggctcaaaagtcatcgaaagttgaagtgaaaggcgagcgaccaacgatacatttcctaggacaagcaagttatgaaaatgatatgaatatcgtcaaagatcaattggaaaatgcaggatttaacgtgaagatgaatatccaaccagattatggaagctatcgtacacaacgtcaagccggcaattatgatatccaaatcgatgactggatgacagtattcggtgacccgaactatgctatgacggcattatttagttctacaggatcaaatagtttattgaaagataaacatgtagaccagttgttaaataaagcttctactcaaaatgaagcagatgttaaacaaacatataagcaaattgaagatgaagttgtatttgataaagggtatatggcgcctttatatggatcaaaaaagaatttagtatatgacaataaagtgttagataaaaatagtgttggattgccaaattcacgtgcattaatatggcaacaatttgattacaacaatagtagagaacgagatacgcggccacttgtgatgacacaacaagatggtgaaattcctacattggatccaatacgttcaattgcgccgtcagtatattcaattaatatgaatatgtacacaaggttattattattagatgaaaatgaccacttaacaacgaaaggttcgttaagtcgtgattatgctgtgaataaggacaataaagcgttttatttcttgttaagagatgatgattattttgcgaaagtggtcaatggacaagcacgtaatactggagagcgtgtatcggctgaagatgttaagttttctttagatagagcacgtgataaaaagtctgtgcctaacaataatacttataatatgcacaaacatataaatgacatcaagatattaaaagatgaggacatcgatcagttgcgtaaagagaaagacaaggacgataaatccatctatgataagttgattaaagcttataacgtcaaatcgttaacgacagatggtcaaagagtaaataataaagacggtatttatcaaattgttaaaattacgacagatcaatcgatgcctcgagaggtaaattacttaacacactcttcggcaggcattttatctaaaaaatttgttaatcaagtaaatcaagaatatccaaaaggatatggggatagcagtaccattcctgcaaattcagatggaaaaaatgcgctttatgcaagtggtgcatacattatgacacagaaaaatgcatatcaagcaacgtttcaacgtaatccaggattcaacgaaacagaaaaaggtagttatggaccagctaaaattaaaaatattacattgaagtttaatggtgacccgaataatgcattgtcagaacttagaaatcattcaattgatatgttggcagatgtgaatcaaaaacattttgatttaattaagtcggataaaaatttaagcattattcgcaaaaatggacgcaagtcagtctttttaatgctaaatattaaaaaaggtatatttaagacgcatccaaacttgagacaagcagtagttaatgcgatagatcaggatcaatttattaagttttatcgtggcgataaatttaaaattgcatcaccgattacaccacttgtcgatactggtaacgagcaacgtcaagatttagaaaaagtagaaaaagccattaatcaataatgttttaaatatttaacagaaagtaggaggatatagtatggtcattaacttaaatgacaaacagacaaaaacatctaaagaagggttaatttccgtatcacatcctcttgcggctaaaattggtaaggatgtattagatcaaggtggcaacgccatggatgccgtgattgcaattcaactggcattgaatgtggtagaaccatttgcatcaggtattggtggtggcggatacttgctatattatgagcaaagtactggcagtataactgcgtttgatgcgcgtgagacagcccctgcacatgtagataaacaattttatctagatgattcaggcgaatataaatcattttttgatatgactacacatggtaaaactgtcgctgtgccagcaattccaaagctgtttgattatattcacaagcgttatgctaaattgtcattggaagatttaattaatcctgcaattgaactagccattgaaggtcattcagccaattgggctactgaaaaatattcgcgccagcaacacgcacgattgacaaagtatcacgaaacggcgcaagtatttacgcatgaaaatcaatattggcgtgaaggtgattggattgtacaacccgaattaggcaagacatttcaaatattaagagaacaagggtttaatgcattttataaaggtgacattgcgaaacaattagtcaatgttgttaaagaatgtggtgggacaatcactttagaggatctagccaattatgacattcagattaaagcgccaatcagtgcgacatttaaagactatgacatttattcaatgggtccatctagttccggtggtatcacggtaattcaaatattgaagttattagaacatgtcgatttaccatctatgggtccaagatctgttgattgcttgcatcatttgatacaagcgatgcatttagcatatagtgatcgcgcgcaatacttggcggatgataattttcatgaggtgcctgtacactcattaattgatgacgattatttaaaagcacgcagtaagctcattgatagcaataaagcaaatattgatatagagcatggtgttgtgtctgattgcattagtcatacagacgttgaagaaaatcataccgaaacaactcatttttgtgtgattgataaggaaggtaatattgcttcatttacgacatcaatcggtatgatttacggatcgggtattacgattccaggctacggcgtgttattgaataccacaatggatggttttgatgttgtggcgggtgggatcaatgaaattgcaccttataaacgaccactaagtaacatggctccaacgattgtgatgcatcacgggaagccaatattaacagtaggtgcacctggtgctataagtatcattgctagtgttgcgcaaacattaatcaatgtattagtgtttggcatggatattcagcaggctatagatgaacctagaatttatagtagccatcataatcgcattgaatgggagcctcaattttcacaatctacaatattagcattgattgcacgtggacatgcaatggaacataaaccagatgcctatattggagatgtacatggactacaagttgacccaacaacgtatgaagcttcgggtggcagtgatgatactagagaaggcaccgtaatgggtggcgaggtgttagtgattagaaaacagccattaccatatcggcaaatgtatgataatgacggctttcgtgtatatttcaatgatgtgcagttacctttattggcagatcaagtgcgatggatgcatggcaaatgttggattgaggagagtgttattagaatcattttccctgaagttagtgcacatattgaagatttaagaagttatgaaaacgcaggagaaaattatatagatgttgtctggttagcacgaaagaaaggttatcaagtggcattgaaagatgacggtttatatttgaatgatgaagcatatcattcagtgaaacggaacacaaatgcatactatagatatgatcgagatagtatcacaagatagtttatgcgtttgatatggagtttgtagtggatatgggcttttgttgaatgaaaggattcgatttcgaactttagcgtgacgcttgagtgtagtaatgttggaaatgctatacaaaacgctagtcacctttgtaaaatatacaacacctcacaaattcgtttttgatgtacatcacaatagttagcctaaaatctaacgtgttgtggtttggtacagttgaacgagttatgtgaggtgtttttataatgtggaattttaatagatgatttggatgtttctataattacagcataagtattaatgttcgctactaagtttaaccagaagtttttatgtgctttcatactttcatacctactctcaaaatatatcatcaacactataatatgttttaaaaatatttacatcgtaactaaagtgaatgtcaaaatttaaatttgtaaaaataatagatgtatataaaaggttgaaaaggattgtaagaaaatcaaaaaaacactgtatgacgtttgattagtcacacagtgtagataagaattaaaatgttgttgccaatttttcagcattattaatactagttgccttaatttcttcagttttatgcggttcggcattgtgtccttcaataatgattgtttcatatgatggcacacctaagaatgtcataattgttcttaaataacggtcgcccatttcgaaattagcagcggggccttcagtataatatccaccacgtgattgaatgtgtaatacttttttgtcagttagtaaaccttgtggtccttcagcagaatatttaaaagttttacctgcaattgaaatagcatcaatatatgctttaactacaggtgggaaagaaaggttccacataggcgttacaaatacatatttatctgcacttaaaaattcttctaaaatgtcactcaatcttgaaactttcatttgttcatcatcagttaacgtttcgccattactcatttttccccaaccagttaatacatctttgtcaataactggaatataagtttcaaataaatcaatatgtttcacttcatcatcaggatgttgttgttgatatgtttcgataaatgctttaccagccgccatagaatttgataccagttcattaaaagggtgtgctgtaatatataatacttttgccatttgaaaattctcctctgtttctgttattttcttaagtataattattatactcgatataaaatttaatatcaatcaaaatattcaaattaccatcattttcttcatctatatttggcagtactactaaagtatgagggcatttaattatgaaatagttgatttagaatatatacttaatacccaaaatatatgaaggatggatgccactatgacaaagcgaccaaaacgtattttggcaacaattatcatttttctttcactattatttacaattatttatatagatgacattcaaaaatggtttaaccaatataccgataaattgacacaaaatcataaaggacaaggacactcaaaatgggaagacttttttagagggagtcggattactgagacttttggtaaatatcagcattcaccatttgatggtaagcattatggcattgattttgcattgccaataggtacaccaattaaagcgccgacgaatggtaaagtaacacgtatctttaataatgaattaggcggcaaggtattacaggttgccgaagacaatggagaatatcaccagtggtatctacacttagacaaatataatgtcaaagtaggtgatcgagtcaaagcaggtgatattattgcatattcaggcaatacaggtaaacaaacgacaggcgcacatttacattttcaaagaatgaagggtggcgtaggtaatgcatatgcagaagatcctaaaccgtttatcgataagttacctgatggggaacgtagcctatatgatttgtagttatagaagagtgcccgcagtctaaaaaattaagcaatcattgtgtgagtatgatacttacataatggttgcttttttcaatgaaaatcgaaatgctaagtcatacttgtttgatttagatattacttaaaaaatgtaagacaaggttgttagcattggcagtgaaatttcgcacgtaaaaaatcattattgtcacactaaaaatagttgtgcactataccaattttctatataaaagtttaattctgacagtaatgtaaacgtttacaatttatgattgacattaataatgagtgactatatgatttatgtaagtatttgcgcaaacgttttcacaaagtgtattgcacaatcaaactgtaaacaaagtatgggaggcataacatggcagaattaaagttagagcatattaaaaagacgtatgataacaacaatactgtagtgaaagattttaatctacatattactgacaaagaattcattgtatttgttggaccatcgggatgtggtaaatcaacaacattacgaatggttgctggactagagtctatcacatctggagatttttatattgatggggaacgcatgaacgatgttgaaccaaagaatagagatattgcgatggtatttcaaaactatgcattatatccacatatgactgtttttgaaaatatggcatttgggctaaagctacgtaaagtaaataaaaaagagattgaacaaaaagttaatgaagcagctgaaatattaggattaactgagtatcttggtcgtaaaccaaaagcgttatctggtggacagcgtcaacgtgttgctttgggcagagctattgttagggatgcgaaagtctttttaatggatgaaccattatcgaatcttgatgcgaagcttcgagtacaaatgcgcacagaaatattgaaattacataagcgacttaatactacgacaatttatgttacgcatgatcaaactgaagcattgacgatggctagtcgaattgttgttttgaaagatggcgacattatgcaagtcggcacacctagagaaatatatgatgcccctaattgcatatttgtggcgcaatttatcggctcgccagcaatgaatatgttgaatgctacagttgaaatggacggattgaaggtaggaacacaccattttaaattacataataaaaaatttgaaaagttaaaagctgctggctacttagacaaggaaattattttaggtattcgagctgaagatattcatgaagaaccaatatttattcaaacttctccagagacacaatttgaatctgaagtagttgtatccgaactgttaggttcagaaattatggtacatagcacattccaaggaatggaattgatttctaaattagattcaagaacacaagtgatggcgaacgacaagattacactagcatttgatatgaataagtgtcacttttttgatgaaaaaacaggaaatcgtatcgtctaagggggagtattcatgtctaaaattttaaaatgtatcacgttagccgtggtaatgttattaatcgtaactgcatgtggccctaatcgttcgaaagaagatattgataaagcattgaataaagatatttctaaagacaagcctaaccaacttacgatgtgggtggatggcgacaagcaaatggcgttttataaaaaaattacggatcaatgtactaaaaaaactggcataaaagtaaagcttgtaaatattggtcaaaatgatcaactagaaaatatttcgctagacgctcctgctggaaaaggtccagatatctttttcttagcacatgataatactggaagtgcctatctacaaggcttagctgctgaaatcaatttatcaaaagatgagttgaaaggtttcaataagcaagcacttaaagcgatgaattatgacaataagcaactagcattgccagctatcgttgaaacaaccgcacttttttataataaaaaattagtgaaaaatgcaccgcaaacgttagaagaagttgaagctaatgctgccaagctaactgatagtaaaaagaaacaatacggtatgttatttgatgctaaaaatttctattttaattatccgtttttattcggcaatgatgattatattttcaagaaaaatggcagtgaatatgatattcatcagctaggactaaattcaaaacatgtcgttaagaatgctgaacgattacaaaaatggtacgacaaagggtatcttcctaaggcagcaacacatgatgtcatgattggtctttttaaagaaggaaaagtaggacaatttgtcactggaccatggaacattaatgaatatcaagaaacgtttggtaaagatttaggagtaacaacattgcctacagatggtggcaaacctatgaaaccatttctcggtgtacgtggttggtatttatctgaatatagtaaacataagtattgggctaaagatttaatgctgtatatcactagtaaagatacattacaaaaatatacagatgaaatgagcgaaattactggacgtgttgacgtgaaatcatctaatccaaatttaaaagtgtttgaaaagcaagcacgtcatgctgaaccgatgcctaatattcctgaaatgcgacaagtttgggaaccgatgggcaatgcaagcatatttatctcaaatggtaagaatcctaaacaagcgttagatgaggcgacgaatgatataacgcaaaatattaagattcttcatccgtcacaaaatgataagaaaggagattagttatgacgaaacgtaaccctaaattagcggcattattatctgttatacctggtttgggacagttttataataaaagacccattaaaggtacgatattttttatctttttcatcagttttatttctgtattttatagctttttaaatattggtttttggggattgttcacattagggacagtacctaagttagacgattctcgtgtcttacttgcacaaggcattatttctatcttactcgttgcttttgcaatcatgctatatatcattaatattttagatgcatatcgtaatgctgaacgatttaatcgcaatgaggaaataaaggatccgaaggcacgtatggttgcaacatgggacaagacgttcccatacttactaatctcaccaggtacattcttattgatatttgtagttgtatttccattaatatttatgtttggagtagcatttacaaactacaatttatacaacgcgcctccgagacacacattagaatgggttggtttagataactttaaaacgttattcacaattggcgtttggcgtaaaacatttttcagtgttattacttggacattagtatggacgcttgttgcaacgacacttcaaattgcattagggctgtttttggcaattattgtaaatcaccctgtcgtcaaaggtaagaaatttatccgtactgtgttaatcctaccttgggctgtaccatcatttgtgacaattttaatatttgtagcgttatttaatgatgaatttggtgcgataaataatgatatattgcaacctttattaggtgttgcaccagcatggttaagtgatccattttgggcaaaagtggcattaattggcattcaagtatggcttggtttcccatttgtctttgcactgttcactggtgtactgcaaagtatttcatcagattggtacgaagcagcagatatggatggtgcgtctagttggcaaaagtttagaaacatcacattcccgcatgtcatttacgccacagcgccattgttaattatgcaatatgcaggtaatttcaataattttaatcttatttatctatttaataaaggtggtccaccagtgtcagggcagaatgctggtagtacagatatcttgatatcttgggtgtataatctgacatttgagtttaacaactttaacatgggtgcagttgtgtcattaattattggatttattgttgctattgtcgcatttattcaattcagacgtacaagtacgtttaaagatgagggaggtttataagatgacaaagaagaaaaacatattaaaagcaatcggtatttacagttttatagcgatgatgtttgtcatcattttatatccactactgtggacatttggcatttcccttaatccaggtacgaacttgtatggtgccaaaatgataccagacaatgcaacatttaaaaattatgcattcttactattcgatgacagtagtcaatacctgacttggtataaaaatacgcttatcgtagcatctgcaaatgcactgtttagtgtgatatttgtcacgttaacagcatatgctttttctagatatcgctttgttggtcgtaaatacgggctgattacatttttgattttacaaatgttccctgtattaatggcaatggtcgcaatctatattttgctaaatacaattggattattagattctttatttggactaacacttgtatatattggtgggtcaataccgatgaatgcctttttagtgaaaggttacttcgatacgattccaaaagaacttgatgaatctgccaaaattgatggtgctggccatatgcgtattttcttacaaattatgcttccattagctaagccgattttagcagttgttgctttgttcaattttatggggccatttatggactttatattacctaaaatactattaagaagtcctgaaaaattcacattagcagttggattgttcaactttattaatgataagtatgcaaataatttcacagtgtttgcagcaggggcaattatgattgcagtacctatagcaatcgtattcttgttcttgcaacgctacttagtatcaggtttaacaacaggtgcgacaaaaggttagtttgaaattgggagcggggcagaaataataaagaaccattaatgaatttattgtgtagtggctcttacaaattagccacagctaatatgtgcctaaaaataggaatacatgagtaaaactcatgtataagaaatactaatttctaaagaaaaagtatttctttatgttggggccccgccaatataacattgtatagcctagaacgttgattgatgtttaaggctcgacatacgcactaatgacgataaagatttaaaggaggacgttatgatgacgattaaagttggaatcattgggtgtggtggtattgcgaatggcaagcacatgccaagtttacaaaaagttgaaaaagttgaaatgaccgcattttgtgacgtagacatttcgaaagcagcgtgtgcggcagaagcatacggtactgacaatgcaaaggtttatgatgattacaaagcattgttaaaagatgacacgattgatgttatccatgtttgtacgccaaatgactcgcattgtgaaattactgtagcagggttgcatgccggtaaacatgtgatgtgtgaaaaaccaatggctaaaacgacagcagaagctcaaaaaatgatagatacagctaaatcaacaggtaaaaaattaacaataggttatcaaaatcgcttcagaccagatagtcaatttttatataaatcagcgcaacgtggcgacttaggtgatatttatttcgggaaggcacatgctattcgtcgtcgagcagtaccgacatggggtgtctttctagacgaagaagctcaaggtggaggaccattaatcgatatcggtacacacgctttagatttaacgttatggatgatggataattatgaaccagaatcagtgatgggttcaacattccataaattaaataaacagcatgatgcggcaaacgcttggggttcatggaatccagatgaatttacagttgaagattctgcgtttggatttattaaaatgaagaatggagcgacgatcattttagaatccgcttgggctattaattctttagaagtggatgaggcaaaatgttcattatcaggaacgaaagcaggtgctgatatgaaagatggtctacgtattcatggtgaagatatgggcacactttataccaaacacgttgaattggaaaacaaaggcgtcgacttttatgaaggtaatgaagtggatgaagctgaagaagaagcaaaagcttggattgatgcagttgtaaatgatactgaaccagttgtgaaaccggaacaagcaatggtagttacaaaaattcttgaagcgatttatcagtctgcaaaatcaggcaaagcaatttactttgaataacatcatacggtaaggaggcacatcatgacaaaattaaaagttggtgtgataggtgttggtggtattgcacaagaccgtcatattccagcattgctgaaactcaaagacacagtcgcattagttgcagtacaagatattaatacagtgcagatgattgatgttgcgaagcgctttaatatacctcatgcagttgagacacctagcgagctgtttaaacttgttgatgcggtggtcatttgtacacctaataaattccatgctgatctttctatagaagcattgaatcatggcgtccatgtattgtgtgaaaagccaatggcgatgacgacggaagagtgtgaccgcatgattgaagcggctaataaaaattgtaaattactaactgtcgcatatcattatcgtcacacagatgtggcaattactgctaaaaaagcgattgaatcaggtgtggttggtaaacctttagtagcacgtgtacaagcgatgcgtaggcgtaaagtgcctggctggggcgtttttaccaataaagcgttgcaaggtggcggtagtttaatcgattatggttgccacttgttagacttatctttgtggctactaggtaaagatatggtgccgcatgaagtgctaggaaaaacatataatcaattgagcaaacaaccgaaccaaattaatgattggggaacatttgatcacactaaatttgatgtcgatgatcatgttactagttatatgacatttgccaatcgagcaagcatgcagtttgaatgttcgtggtctgcaaatataaaggaagataaggtacacgttagtttatccgaagatggcggtattaatttatttccatttgaaatatatgagccccgctttggaactatttttgaaagcaaagctaatgttgagcataacgaagacattgctggtgagagacaggcgcgtaactttgtcaatgcgtgtttagggatagaagagattgtggtgaaaccggaagaagcacgcaatgtaaatgcccttatagaagcgatttatcgtagcgatcttgataacaagagcatacaactttaatgattattatatataatacaaaattctcaatataaaaagaaggagtgcttttcaatgaaaataggtgtattttcagtattattttacgataaaaattttgaagatatgttagattatgtcgcagaatctggattggatatgattgaagttggaacaggtggtaacccaggagataaattttgtaagttagatgagttgttagaaaatgaagataagcgacaagcatttatgaagtcaatcacagacagaggcttacaaataagtggtttcagttgtcataacaatccaatttctccagatccgacagaagcgaaagaagcggatgaaacgttacgtaaaaccatccgtttagcaaatctattagacgtgccggttgttaatacattttctggcattgcaggatcagatgataccgctaaaaagcctaattggcctgttacaccttggccaacagcctactctgaaatttatgattatcagtggaatgaaaagttgataccatattggcaagatttagctgagtttgcaaaagagcaagatgtaaaaattgccatagagttgcatgcaggatttttagttcatacaccatatacgatgttgaagttgcgtaaggctacaaatgaatatatcggtgctaacttagatcctagtcatttatggtggcaaggtattgacccaattgctgcgattcgcatattaggccaagcaaatgcaattcatcacttccatgctaaagatacgtatattaatcaagaaaatgtaaatatgtatggtctaactgatatgcaaccatatggtaacgttgcaacaagagcatggacattccgtacagttggttatggacatagtccatatgtatgggcagatatcataagtcaacttattattaatggatatgattatgtattaagtattgaacatgaagatcctattatgtcagtagaagaaggtttccaaaaagcttgtcaaactttgaaatctgttaatatttacgacaagccagcagacatgtggtgggcataatacgaactcgaggttagtctgaagtttgtctgaagtaagactggtggcagtgttgaataaatgcatatgtcgccaagccattgccaaaaatttcacaccttaaatcaagttcattgtttgtaaagaaggtgtactttatataagtatatagcgatggtcgtacctattcacagtaacaatccgcaccattgaaaagagtatataaccttttcaatagtgaggtatatgataataaaaaagcctgttgtcacaatggtcatagacacgacatactttaaaggtttctgaatataatatttcagaacgcactttaaagatggacgtcgatgtcgactaatgtgatgacaggctttcatttttaaatattcattaatttctcttcttgtttaatacgtacatataagaaatacgcatacggtactaataaaatagttgtatatgttgcgtgtgttaataataatacaccgattaattcaggaatgatgtttaagaagtaatttgggtgttttgtaattttatataatccagatttaataataggatggttaggtaaaatgaataattttaatgtccaaataccacctaaagttttaataaccataaataacataatataagcaaagattaatataactaagccaataccatttgcaaagctaaatgtatctttattaataaatgcctctacaccagccaatacataaattaaaacgtgtgttattgctaaaaacttcgaatttttaacgccatattcaactgcaccgtctgcttttaattgttttgagtgattaatagatatctttaagctgacaagtctgatacagaaaaagataagtaatatagatagaatcatgatgtcctccgtcattatgtcatatgtataagcgttgattttgacaacataaagtattttatagataaagcttgtcaaatactattaactatttattaattttagtacataaatatgtttctaagtatgtgtttatgttcagtattttggataatttaataattttaaggatattaagcgcttacaccgacgtgatatatttggcttaacgaaaatgattgaggtgacagagatgaacttttttgatatccataagattccgaacaaaggcattccattatcggtacaacgtaaattatggcttagaaacttcatgcaagctttcttcgtagtgttctttgtttatatggctatgtatttaattcgaaacaactttaaggcggcacaaccgtttttaaaagaggaaattggattatctacattagaacttggttatatcggattagcatttagtatcacgtacggtttagggaaaacattacttggatattttgtcgatggacgtaacacaaaacgtattatctcattcttacttatcttatctgcgattacagttttaattatgggatttgtgttaagttactttggttctgtaatgggattattaattgtactttggggacttaacggagtgttccaatcagttggtggacctgcaagttattcaacgatttcaaggtgggcgccaagaacgaaacgtggccgatatttaggattctggaatacatcacataatatcggtggtgccattgcaggtggtgttgcactttggggtgctaatgtattcttccatggaaatgttataggaatgttcattttcccatcggtgattgcattacttattggtatcgcaacattatttatcggaaaagatgatccagaagaattaggatggaatcgtgctgaagaaatttgggaagagccggtcgataaagaaaatattgattctcaaggtatgacgaaatgggagatctttaaaaaatatatcctgggaaatcctgttatatggattctatgtgtttcaaacgtctttgtatacattgtacgaatcggtattgataactgggcaccgttatatgtgtcagagcatttacactttagtaaaggcgatgcagttaatacgatattctactttgaaattggtgctttagttgcaagtttattatggggctacgtatcagacttattaaaaggtcgtcgtgcaattgtagctattggctgtatgtttatgattacatttgttgtcttattctacacaaatgctacaagtgtaatgatggttaacatttcattgtttgcattaggtgtgttaatctttggtccgcaattattaattggtgtatcattgactggttttgttcctaaaaatgccatcagtgtagcaaacggaatgacaggttcattcgcgtatctattcggtgactcaatggcaaaagttggtttggcggctattgctgatccaacacgtaacggtttaaacatctttggatatacattaagtggatggacagatgttttcatcgtcttctatattgcattattcctaggcatgattctattaggaatcgttgctttctatgaagaaaagaaaattagaagtttaaaaatctaatatcaatcggattaaaagtatcgccaatttattgcagtatagttggcaatcctgccccgatggcatgtgcgtgaagagatgaaagatactgcttctacccttgcaaatatatcatctctatgtctcggggcagatcataattccctgttatgaagtatccttatttgcccgacttagggtgactcaatgaatttactccttacaataaagacatatagcggtgtcaatattgtagggagtattgttttatatttaaactctctaaaaagcggactgaaagaaaagtgaaaacttctctagcagtccgctttttcatagaacaaaatggatgcgccataatcattagctatttgttaatctattttgcttgcttacaataatcacttggcgacatttgtaaatattttttaaaatgatagctaaacattttatactctgaaaagcctactttgtctgcaatttcatagtgcttataatgtcgatctaacaattgcagagattgtaaaatacgatagcgatttaaataatcgacaattgtaataccaacatgatctttaaatgttcgcatcgcatacgattcactaacatcgatatgttgaattaaatctgaaacagtcactttcgtttgataagattgcttaatttgatcaacaatctgatttacataataatcatcgtattctacttttaataatggttggaaggcatcatgacaagatgctaagctacggccgttctgtgattgttgctctaataaggtacggacaagtcttcctaaaataacttctaattgcgcatggtccactggttttaataaataatcaagaacatgatgttgaatgccggctttcatatattcaaagtcatcgtaactcgataatatgatgacattacaatctagatgcgcaatatcattgagtaaatcgacgccatttttacgtggcatacgaatatcagtaattactaattctggctgatgttgttgaattagtgataatgcttcaacaccatctttagcagtgtatattgtattgaaatgatagtctccccaaggaatgatttgctttaaaccttctcgaataattcgctcatcatcacaaataacaaccttaaacatctacattcccccttgaaagtggtattttataacaaattaacgtaccttgattacgctttgaaaaaatatggagtcgtgcatgtgacccatattgaatcattgctttattgtgtaaatgatttaatcccaaatgcttagtatcaaatacatcattattaagagattggcgtacatattgcaggcgagatgacgacatcccaataccattgtcgcaaactaaaacatgtaaattctgacgtgccaatgtcaggcgtatagtaatgtccagtgactcagtatctctaccatgtttaatagcattttctatgagtggctgaagcatcattttaccaattgtctgttgacgcccttcttcagaactttcgatatggagcttaatcatgtcatcaaaacggatgttttgtatcgcaacatactgttcaatgtagttcaactcttcgtttaattccactgtatgtgagtttgtacgtaatgaataacgtaacatttgcgataattgttggaccacagtttgtgctaatttcggagataacgtaattaaatattgtattgtttgcatcgtattgaataggaaatgaggctggaattggcgttctatttcctttaactgaatatcacgcaagcgacgttctgtatgctcgatagaatggatcagttgctcatttgattcaaataaatcgtaaatataattattaatttcttctagttcactgttgttttttaaaggcgtatatgtacctagatgacgatttttggcatagtaaattttttgaataatcgtttcgatatcttttgtttgtcgtttagccatattatctgcactaatgaaaccaaatattactagtaaaacaagaactacagccataacaattaacaacgtgataccatcttcaatgttttcatggatatctttataaataatgagacgatggtcagcatggtttaattttacagattcattcataaatccgaattgttgtggtctatacttttcacctatagtaaaacggtcatcgttggcgtataaaatattgtcatactgatcaacgataagtgcgaattgtcggctatctttcttgatttcacttaaacgtggggtgttagccatataaattttaagcatatatgtactatttttgaatttaagccgatgcgttgaaaataaatacatatttttagtgtttaaatgttcataattattggttataaactgatttggtccagataactcataataaagtgttgcgggctgttggtgtattaattttaataattcacgttttgtagcggtaacatcatgatgatttgttaaatcgagctcttgaaacgaattattatgctgtgtaataaatgtctgaatctgcttttcagtgtgatgtaaagatgactgactttcattaacatgttgatgaatcgtacgatgctcaatccaaatatagatggcatagaagcttactagtccaataataatgactaaaaatactggaaaaatagtagacgcaaataacgatcgtctcaactgatgtctataaggtttgtatgccgtcattgaatcatctccgaaaatttatgatgcggaatgtccggtaatttagatttcggtattaaaggtatgttcttaagattttcgatagactgatcgctttgttcactaacatcctttcgaattgacttggcatcgaactctgcaactaatcgctgctgtactgagcggcttgttaaatattgtactaactttttacgcttaggatgagggtgtgcatttttaactaaagcaataccatcaacatttaacattgttccttcaattggataaacgattgatacaggataacctttgtttttccatgtgcgtgcatcttgttcgtagcttagacctgcataatatttaccttttgcaacatcttcaatgactttagacgtttttgacagttgcatcgcatggtcttggaattgatgcacatcacttactcgatgatgcatgctataaatagcacgcatatgttgataacctgtcgttgttgtatttggatttgagtacgcaattttacctttaagtataggttgtaataaatcttgataacctcgaatcttaatatctccttgtaaatctgaattaactactataactgttggcattaatagaaagctaataacatatttattgttcgagcgataatcctctaattgctgtgttacagatgtatcttgatagggaacaaaatcttctggatgatcaattgtttctgataacacaccacccataaagacatcaccacgctccgaaagatcttcattatgcaagtttgaaagcagtacttgagtagatccgtgtttgatttcaattttgacatgctcttgtttttcaaattcatttaaaattggacgaatcaagtttgattgatacggagaataaactgttaatacatttttatctgattcagagtgacgcgtattagcgcatgatgataaaaaaatgagaaataatagcaagatataaatttttgatttcatgatatcccatcaattctatgtatattttaatacaataattttagcaataaatgacgcataagtaatgttaaatatttagaaatgtttatagatgacttgttaagacgttgcaaatgttgtgatagcacataatttttgtttgtcaagacgacttaccgaggctgtaaagtcaaactgttatattttatttgaagctgttatataaaaattggcaagatattgaacggttcaaaagtaaatttttacgtcaataaaagtatttaatccagtctcttcatatataaaagtaaatctttctaagtattgatttaacgcttattaacaatcattttttataaacaaatatatccacctaaattaacttttaaagcaatgaaaatagtgaacattataactgttgtgtaacagaatgcaattagcatattactgttacacaaattagtacagtttctatgttttgacatacatttgatgaaaattgtacataatttatgtgaaaaaaatcacaacaaacatgctacaatgactatgaaaacgttaacatagcatttcaaattcacaacattatacagatggaggcgtttagtatgttagaaacaaataaaaatcatgcaacagcttggcaaggatttaaaaatggaagatggaacagacacgtagatgtaagagagtttatccaattaaactacactctttatgaaggtaatgattcatttttagcaggaccaacagaagcaacttctaaactttgggaacaagtaatgcagttatcgaaagaagaacgtgaacgtggcggcatgtgggatatggacacgaaagtagcttcaacaatcacatctcatgatgctggttatttagacaaagatttagaaacaattgtaggtgtacaaactgaaaagccattcaaacgttcaatgcaaccattcggtggtattcgtatggcgaaagcagcttgtgaagcttacggttacgaattagacgaagaaactgaaaaaatctttacagattatcgtaaaacacataaccaaggtgtattcgatgcatattctagagaaatgttgaactgccgtaaagcaggtgtaatcactggtttacctgatgcatacggacgtggacgtattatcggtgactatcgtcgtgtagctttatatggtgtagatttcttaatggaagaaaaaatgcacgatttcaacacgatgtctacagaaatgtcagaagatgtaattcgtttacgtgaagaattatcagaacaatatcgtgcattaaaagaattaaaagaacttggacaaaaatatggtttcgatttaagccgtccagcagaaaacttcaaagaagcagtacaatggttatacttagcataccttgctgcaattaaagaacaaaacggtgcagcaatgagtttaggtcgtacatcaacattcttagatatctatgctgaacgtgaccttaaagcaggtgttattactgaaagcgaagttcaagaaattattgaccacttcatcatgaaattacgtattgttaaatttgctcgtacacctgattacaatgaattattctctggagacccaacttgggtaactgaatctatcggtggtgtaggtattgacggacgtccacttgttacgaaaaactcattccgtttcttacactcattagataacttaggtccagcaccagaaccaaacttaacagtattatggtcagtacgtttacctgacaacttcaaaacatactgtgcaaaaatgagtattaaaacaagttctatccaatatgaaaatgatgacattatgcgtgaaagctatggggatgactatggtatcgcatgttgtgtatcagcgatgacaattggtaaacaaatgcaattcttcggtgcacgtgcgaacttagctaaaacattactttacgctatcaatggtggtaaagatgaaaaatctggtgcacaagttggtccaaacttcgaaggtattaacagcgaagtattagaatatgacgaagtattcaagaaatttgatcaaatgatggattggctagcaggtgtttacattaactcattaaatgttattcactacatgcacgataaatacagctatgaacgtattgaaatggcattacatgatacagaaattgtacgtacaatggcaacaggtatcgctggtttatcagtagcagctgactcattatctgcaattaaatatgcacaagttaaaccaattcgtaacgaagaaggtcttgtagtagactttgaaatcgaaggcgacttccctaaatacggtaacaatgacgaccgtgtagatgatatcgcagttgatttagtagaacgatttatgactaaattacgtagtcataaaacatatcgtgattcagaacatacaatgagtgtattaacaattacttcaaacgttgtatacggtaagaaaactggtaacacaccagacggacgtaaagctggcgaaccatttgcaccaggtgcaaacccaatgcatggccgtgaccaaaaaggtgcattatcttcattaagttctgtagctaagatcccttacgattgctgtaaagatggtatttcaaatacattcagtatcgtaccaaaatcattaggtaaagaaccagaagatcaaaaccgtaacttaactagtatgttagatggttatgcaatgcaatgtggtcaccacttaaatattaatgtgtttaaccgtgaaacattaatagatgcaatggaacatccagaagaatatccacagttaacaatccgtgtatctggttacgctgttaacttcattaaattaacacgtgaacaacaattagatgtaatttctcgtacattccatgaaagtatgtaacaaaatttaaggtgggagcactatgcttaagggacacttacattctgtcgaaagtttaggtactgtcgatggaccgggattaagatatatattatttacacaaggatgcttacttagatgcttgtattgccacaatccagatacttggaaaattagtgagccatcaagagaagtcacagttgatgaaatggtgaatgaaatattaccatacaaaccatactttgatgcatcgggtggcggtgtaacagtcagtggtggcgaaccattgttacaaatgccattcttagaaaaattatttgcagaattaaaagaaaatggtgtgcacacttgcttagacacatcggctggatgtgctaatgatacaaaagcatttcaaaggcattttgaagaattacaaaaacatacagacttgatattattagatataaaacatattgataatgacaaacatattagattgacaggaaagcctaatacacacatccttaacttcgcgcgcaaactgtcagatatgaaacaacctgtatggattcgacatgtccttgtgcctggttattctgatgataaagacgatttaattaaactaggggaatttattaattctcttgataacgtcgaaaagtttgaaattctgccatatcatcagttaggtgttcataagtggaaaacattgggcattgcatatgaattagaagatgtcgaagcgcccgatgatgaagctgttaaagcagcctaccgttatgttaacttcaaagggaaaattcccgttgaattataaatacaattcagaccgaaaagaaagcatatgtaacttcaagagtgaaggggcatatgcttctttttcaattgagtatagagtattagcaagacgtagtaggtatatgagacaacttctacaatggttgaaggaagacgtttttgtaagtagctatgctgataaagaatgtgaagccttgttaaaggtggggttccaatatcatcgaatgggttattaattgctacttgcatatgaatatgagtcttttcaaatttttattgaccctgagtaatgaaaaatattaagatgaaacttaatattaaagcaatgcggagcgtgattatgaagagaattagtaaagatatatgggcagtatttaaattactgtatcaaaataaagggcgttttagcattaatgccttactattgcagttaatcatgatttttattagtagtacatacttaattttactatttaatatgatgttaaaagtagctgggcaaagccaacttacgattaacaattggatggaaatcgtaagtcaccctgccagtgtgatacttcttattatattcatattaagtgttgcctttctgatttatgtagagttttcattgttagtttatatggtttatgccggctttgatcgacagattattacatttaaatccatttttaaaaatgcctttgtaaatgtgcgtaaactcataggtgtaccagttattttctttgtcatttatttaatgttaatgatacccattgccaacctaggactaagttcagtattaacaaaaaatatttacatacctaaatttttaacggaagaacttatgaaaacgacgaaaggtataatcatttacggtacctttatgattgctgtatttatattaaactttaaattaatatttaccttaccgttaacgattttaaaccgccagtcgttatttaaaaatatgagactaagttggcaaattacgaagcgaaataagtttcgacttgttatagaaatagttatattggaactcatcattggtgcgattttaacattaattatttcaggagcaacatatcttgctatttgtgtagatgaagaaggagataagtttttagtctcatcaattttatttgttgtattgaaaagttcattgttcttctattatttatttacgaaattatcattaatcagtgtgttagtactgcacttaaaacaagagaatgtattagaccaaccgggcttagaatttaaatacccaaaaccgaaacggaagtctaggttctttataatttcaatggtgcttgcagtgacatgttttgtcggttataacatgtacttactttacaataatactatcaatacaaatatctccattattggccatcgtggtttcgaagataaaggcgttgaaaattctattccgtcattgaaagctgctgcaaaagcgaatgtcgaatacgttgagttagatacaattatgacgaaagataaacaatttgttgttagtcatgataacaatttgaaacgtttaacaggtgttaataaaaacatttctgaatctaatttcaaagatgtcgtcggtttgaaaatgcgtcaaaatggacatgaagcaaaacttgtatccttagacgaatttattgaaacggctaaacaatcaaatgtgaagctactagtagagttaaagccacatggtaaagaaccagcagattatacacaacgtgttattgatattttgaaaaagcatggtgttgaacatcaatatcgtgtgatgtcattggattatgatgtgatgactaagttaaaaaaagaagcgccatatctcaagtgtggttatatcattccgttacagtttggtcattttaaagaaacatcattagatttctttgtcatcgaagatttttcttattcgccaagacttgttaatcaagcacacttggaaaataaagaagtctatacttggaccattaacggcgaagaagatttaacgaaatacttacaaaccaatgttgatggtattatcacagatgacccagcattagctgatcagattaaagaagaaaagaaagacgaaacatacttcgatcgttctataagaatattatttgaataatataaacaaagacctctaaagttatcaagatgatactttcagaggtctttttaacgttgctatctatgggataggcaatcgtttcattcgtttataatcatatgacaaggatttataagataatgtggggtccaaaacacatatatgatttattggtaaattattaattgttttgtgaatgcaaagggttagaaattgaatcgtaaatactttctaatctatgtttcgctttagtcatttgatccaaatttttagtgcgtatagcggatttagcaatatagtgcgcagctaaaatatcgcgtttttgatacgcatctaaatttaggtacgataatttatttaagtcagtgtttgctattaattcatgtaattgatctacaagcgcttgatgttgatacgtatgtgatgtagtttcagatttgcttgctaatttaataccagtcgtatcaaggagcgccgctttaataccagcaactaaatatgttttgattttcatttgtgttgtcatgctttgttactcctttgatgtacattaatcaaaaaaattatacactattgtatattgcaaagctaattaactataacaaaaagatagttaatgctttgtttattctagttaatatatagttaatgtcttttaatattttgtttctttaatgtagattgggcaattacattttggaggaattaaaaaattatgaaaaagcaaataatttcgctaggcgcattagcagttgcatctagcttatttacatgggataacaaagcagatgcgatagtaacaaaggattatagcaaagagtcaagagtgaatgagaacagtaaatatgggacattaatttcagactggtatttaaaagggagattaactagtctagaatctcaatttatcaatgcattggatattttagagacatatcattatggcgaaaaagagtataaagatgcaaaagataaattgatgacaagaattttaggggaagaccaataccttttagaaagaaaaaaagtgcagtatgaggaatacaaaaaattataccaaaaatataaagaagagaatccaacctctaaagttaaaatgaaaacattcgatcaatatacaatagaagatttaactatgagggaatataatgagttaacagaatcattaaaaagtgctgtaaaagactttgagaaagatgttgaaaaaatagaaaatcaacatcatgatttgaaaccatttactgatgaaatggaagagaaggctacttctagagttgatgatttagcaaataaagcatatagtgtttattttgcatttgttagggatacacaacataaaactgaggcattagagttaaaagcgaaagtagatttagttttaggtgatgaggataaaccgcatcgtatttctaatgaaagaattgaaaaagaaatgataaaagatttagaatctattattgaagatttctttatagaaactggtttaaataagcctggtaatattacgagttatgatagtagtaaacatcactataaaaatcacagtgaaggttttgaggctctagtcaaagaaacaagagaagcagtagcaaacgctgacgaatcttggaaaactaaaactgtaaaaaaatacggtgaatctgaaacaaaatctcctgttgtaaaagaagagaacaaagttgaagaccctcaatcacctaaatttgataaccaacaagaggttaaaactacggctggtaaagctgaagaaacaacacaaccagttgcacaaccattagttaaaattccacagggcacaattacaggtgaaattgtgaaaggtccggaatatccaacgatggaaaataaaacgttacaaggtgaaatcgttcaaggtccagatttcccaacaatggaacaaagcggtccatctttaagcgacaattatactcaaccgacgacaccgaaccctattttagaaggtcttgaaggtagctcatctaaacttgaaataaaaccacaaggtactgaatcaacgttgaaaggtattcaaggagaatcaagtgatattgaagttaaacctcaagcaactgaaacaacagaagcttctcaatatggtccgagaccgcaatttaacaaaacacctaagtatgtgaaatatagagatgctggtacaggtattcgtgaatacaacgatggaacatttggatatgaagcgagaccaagattcaacaagccatcagaaacaaacgcatacaacgtaacgacaaatcaagatggcacagtatcatacggcgcccgcccaacacaaaacaaggcatcagaaacaaacgcatataacgtaacaacacatgcaaacggccaagtatcatacggagctcgcccaacacaaaagaagccaagcgaaacaaatgcatataacgtaacaacacatgcaaacggccaagtatcatatggcgcccgcccgacatacaacaagccaagcgaaacaaatgcatataacgtaacaacacacggaaatggccaagtatcatatggagctcgtccgacatacaagaaaccaagtaaaacaaatgcatataacgtaacaacacatgcaaacggccaagtgtcatacggagctcgcccaacacaaaacaagccaagcgaaacaaacgcatataacgtaacaacacatgcaaatggccaagtatcatacggagctcgcccaacacaaaacaagccaagcgaaacaaacgcatataacgtaacaacacacggaaacggtcaagtgtcatacggcgctcgtccgacatacaacaagccaagtaaaacaaatgcatacaatgtaacaacacatgcagatggtactgcgacatatggtcctagagtaacaaaataagtttataactctatccatagacatacagtcaatacaaaacattacgtatctttacaacagtaatcatgcattctatgatgcttctaactgaattaaagcatcgaacaatcgaaagcatatttctaaattatttattcattatagtcttaaacataacatgacctaatatattactaacctattaaaataaaccacgcacatctatgtgatatacgacaatcacagcaataataattgctttagaaagtcgtaccgaactggaacttacaagtctagttcgaacacactgatgtgagtggttttctttattttaaacatgaacaatcagataagttactagcattagcaaatattattaaatcaaagggcttcgattcataaaatttaaaacaatgattaaaattagacgtgtaaatgttaaattctaaaacggaaatacccgctatcctattaaaccactttttggttcaatcactatatttcacacagcttcaataataaaacgaaactgcttcaatccgcttcaacttcaacctacctcattcagtaaccaaacgaatccgcttcatccaaaatcaaccattctaacgcacatactcaaatatagcagctgcacccataccgacaccaatacacatcgtaaccatgccgtaacggctatcgggacgtctacccatttcattaagtaaacgcgcggttaacattgctcctgtagcacctaatggatgacctaaagcaatagcgccaccattcacattcgtacgtgatatatctagacctacttctttaatagatgcaatcgtttgagaagcaaatgcttcgttcaattcgatcaaatcaatatcttcaacagatagattgctgagtgacaatacttcaggaatcgcatatgcaggcccaatacccataattttcgggtcaacgcctactgccttataaccaacgaatcgtgcaataggtgtcacgtcgagttctttcactttatctccagacattaaaactacaaatcctgcaccatcagaaagtggggcagatgttcctgcagtcacagtgccgtcagctttaaatactgtacgtaatttggctagtgcctccatcgtggtgtcaggtcgtataaattcatcttggtcaaagatatttgtgtgtacttttggtcctgcgtttgtatattcaactgagtttacttgtattggaataatttcatctttgaaccgaccatcacgttgtgcgtcataggcacgttgatgacttctgacagcataagcatcttgatcttcgcgtgatacgtcaaattgggatgctacattttcagcagttaaacccataggatatgacgcacctatatcatcatattgtaaggtaggattgtttgtgggctcgttgccacccattggtacggcactcatcaattcaacgccaccagctacaagcatatctccttgaccagccataatttgattggctgcaatcgcgatggtttgtaatcctgatgagcagtagcgattcactgtttgacccggtaccgtgtcagataatcccgtacgcaatgcaatcgttcgtgcaatgttttgtccttgtaatccttctggaaaagccgtaccaacaatgacatcttcaatcatattcttattgaattttccgtcaatacgtttcaatacgccttgtaatactttggctgcgacatcatcaggtctttcgtggaataatgcgccttgctttgctttcgctgcggctgaacgcccataagctacaatgtatgcttcttgcatggttatcatcctctcttaatgactatcttttaattacgtaatggcttaccagtttttaacatatgcgcaattctttcatatgattttttagattttagtaagtcaataaagccaattttctccaacgattgaatgtaacgttgattgataaatgtatttcttggtaaatcaccacccgctaaaattgtggcgatatttaaggcaatatgataatcatggtcgctaataaaatgaccccgtctttgcgcatctaattgtccttggatcaatgctttgaagtcttcgcctaaagcgatatattgatgtctaggattcggaatatagtttgtttctgcttcatatttcgcacgtttgagcgcaacttcgacacgttgtgctgtattgaaaataatcgtatctgtatcacgtaaataaccataacgacgtgcttcaaaggcatttgtagagactttcgcaaatgcgatattcgtcagtacttttgtcatggaagcttgtttgtcatcaaacttatgcgatgtgcgtaatatgcgatcagccatttctgcaaggccaccgccactcggtaataagccaacacctgcttcaacaagaccgatatatgtttcacttgcagcgacaacaataggtgagtaaagtacaagctcacagccaccgcctaaggcacgaccttgaacagctgtgactactggtttcaaactatacttcaaacgattaaagctataatgcaatttatcaattgattgtgcaacgacatcatctacaagaccgtcttcatgtgcctttttcattaagaaaaggttagcacccacactgaaattattaccatctgcataaataaccatacttgtgtaatgttcattttccagtaaatcaatcgcatcaactaacgcatcgttgaattcatcggtaatgacattatttttactttgtaatttcagtagcagttgattatcatgagttacggaaagtttggcatcacctttatcccaaagttcatcttttacgaagtgagaaacaggtgttgcatattcaatggtctcatcttgtttataaaagccaccatctaaatcactaatccattgtggtaagtctccaagttcgtcttccatacgtgttttaacacgttcatatcccattgcatcccataattggaatggaccaagtttccagttgaacccccagacaagcgcacggtctatgtctcggaaatcatcggtagctttaggtacattgatagcagagtaatagaaattattacgtaatgtctcccataaaaatagtcccgcttcgtcttgcgcattgaatatgacatcaaggttatgcactaagtctttattaaattcatttaaaattggtaattgtggttgcgatgcaggtacataatcttgcttttcaacatcgtaaacaagtcgagctttagtttctttatcctttttgtaaaatccttgtttcgttttacgtccgagtgcgccattttcaaacaacgtatttacaattttgacatcatgaaaataaggtgtttcttcaggtacttgttgcatgcctttaattacagacactgcaatatctaaaccgactaggtcagatagggcatatgtacctgttttaggacgaccaatcgcttgcccagttaaagcatctacatctacaatgcttaacttgtgttgctcggcgcgatacataatatcattcattgtttgcgtgccgactctatttgcgacaaagccaggcacatcattgacgactatgacacctttacctaacgcattttgcgcgaaattttttacatctaatatgatagattccttcgtgtgtgacgtaggtattaactccactaatttcataatacgtggtgggttaaagaaatgtagaccaaagaatcgttcttgatccttctcgttaaatgcttgagcaatcgcattaattggaatacctgatgtatttgtggcgaataaagcatcttctttagcatgttgtagaacttgttgccaaacagcatgcttaatttcaatatcttctttgactgcttcgatatataaatcagcatcatcatttaccaagtcatcatcaaaattaccatatgttaaatgactcgctagatttaagtcgaatagtagcggtcgtttcttatctgtaattttatcgtaagattttttcgcaatgagatttggatcgtttttgtccactacaatatctaatagttttactttaagtccagcattcacaaagagtgctgccagttgagcgcccattgtgcctgcgccaagaacggttactttattaattgtcatagtgattcctccaatttagttgaggataagataaccattaagataattggaataacgttgctattttataaaattaattaagtatctttgacagtcatcttagcctcttatttaaggaaaaagctttatgcttaaaataagtcttttttagtgaaattaatgcatctcatataattctttgctatttatacgaaagcagaatctccagtcaaagcgcgtccaattactaaggcattaatttcatgtgtaccctcgtacgtgtaaatcgcttctgcatcagagaagaaacgtgcaatatcataatcgtcagctagtatgccattaccacctgtaataccgcggcccatagctactgtctcacgcaaacgtaaggcattcatcatcttcgccgttgaagttgcaacctcgtcatattcaccatgtgcttgcatattagctaattgagcacatgttgccattgcttgagctaaattaccttgcatcattgctagcttttcttgtattaactgatatttactaattggtttgccgaattgcttacgctcagtgacataatctaatgtggcacgtaaagcgccagccataccaccagtagccatataggcaacgcctgctcttgttgaataaagaattttagcaatgtctttaaagcttgttatgttttgtaagcgatccgcttcatctactttgacattagttaatttaattagtgcgttaggaacaatgcgaagtgcgattttattatcaatgacttcaatatcgacgccatcttgttctggtctgactacaaagcaatggggtttgccagtttctttatttactgcgaatactggaatgacatcagatacatgtgcaccaccaatccatttcttttcaccattgataacccaagtatcgccctggcgttcagcgactgtttcaagacctcccgcaacgtccgaaccgtgttctggttcagttaaagcaaagcatgtacgcagttcatgtgactgtaatttaggtacatatttcgcaatttgttctttgctacctccgaaatagaaagtgttatgccctaaaccttggtgaacaccgagtagggtagctaaggaaatatcaaatcgcgcgagtaggtaagacatgaaaaactgaaatagttgactaggcattttggcgtttggacgatctttgtatagtaatggattgttaaaataatttaattctcccagatctttaaaatagtcctcgggtacagtagcgtctatccaatgttgattaatattttcacggtacttactttctagcaatgaatctacttgttgtaaaaattcgacttcaccgtctgttaaacctttagcaatactaagtacatcttcaggaaataatgtttttaagactgtttctttttcaaatgtcatataaattcctcctaaaaataatatgaatactaatgtgaaatacatttaattcaaaaacaacacgtttcacatgtaaacgtttacactaaatatcaaaaatttttatcacctttaaagtgtttgtgagactttgtcattcatcatttgtcgaatcgcaagtttatctggtttctgcgtactgtttaacggcatatgtgtcactggtacatacattcttgggactttataacctgctaaacgacttcgcatatgttgatctaaaatttcagcgtaatttggttcatcttcgcgaagtataatggctgcagcaattgactcaccatattttggatgatcatagccaacgaccacacaccggtctactagtggatgctcagctaaagcattttcgacttcggatggtaagacattttcgccaccagttatgattaattcttttttgcggtcaataataaatatatcgccatcgtcgtccatttttgctaaatctcctgtcaataagtaacgaccatgaaacgctttggcagtctctgctggtttattccaatatcctggcgtgacatttttagccttaattgcaagttcgccaatctcaccagtaggtacttcttcaccgttatcatcaaggatacgtgcatcaacaaacatgactgctttaccaatactcattggtttacgttttgaattttccggtgtattaacaagtacaagaggtgcttcagttaagccatagccattaataatgtttatgccatattgtttaaaagctgcttgaatacttggtaatggttgtgaaccaccttggatgatataatccatagctttaaaattttcaggattaaaattactagcacgtagcgtactataatacattgtcggaatcatgataataaatgtagggtgatattgtgcaatcatgtcattcaattcttcgccgttaaagtaacgttgaagaataagtgtgccacctgacattaatactggtaatacagtatcgttaaatcctaaaacatggaacattggtgttgatacaatcgtaatatagtttgaattgaacttatacgtcagctctaagtttgcgccgttatgaacaaatgattcatatgagaacatcacacctttaggtgatccggttgtaccacttgtataaattaatgctgcaagatcttgtggttcaacaggtgttgcttgaaaaggttggtgataatctggatttacgatttcatcatattgcgctacatcaatatccatatgcaataagttttggtcaatatcggtgagtgaacttaaatgtttttcagcatagaagagcagttttaattgtgcatcttccacaatggctgcaatttcttttgggttaagccgccaattcaatggtaaaaaaactgcacctgttttaaaacaagcaaatagtaaatctaatattgcaatatcatttggcgcaaaaataccgataacatcgccttttttaacaccttgagatgttaaataatgtgccatattatcagcgcgtgcattgagttgttggtatgtccaagatgtttgttttgcgtgatcaataacggcaggcttgtcatcatcgaagtctgaacgcgtttttatccaatcgaaattcattagtataccccctttagcttcactttcatactttatgaattgattgtttaagttgtccccatttttctttgtaaatgctggtatcaattaattttaaatgatcagcaataattggtttaaaagccatttgatttaaaatatctttatgcaaatcaagacctggtgcaatttcaattagtttcaagccttgattggtgagctcgaatactgcacgatcagtaacaaaatagacttcttgctcgagtgattgtgaatattgtgcattaaagtcgatatggctcacatctgatacaaatttctggttttgtccttcagtttcaatgtttaatcgttgattatgacatgtgacatgactgccagctacaaaagtacctgaaaagataattttatttacagattgtgtaatgtctataaagccgccacatccatttagtcggtcattgaagtaagacacgttgacattgccgtattgatcaacctcagcaaagctaagataggcaactgatacaccattgttataaataaaatcccatgctcgatcatgaggcatgcgcacatctgcattgtaattcataccaaaatgttcacgactcccaacgaatccaccgaaaatgccaacatctagaatcggttgcacatcatgttcaacacattcttcatgcaataaattagagagttcattattgatgccataaccgatgctaattgtatcgccataagttaaaaactgagcagcacgtcggagaatcaatttgcgactattaaaaggtaatgcgggttcaggtattccatcaattcgttcttctccagacaaggctggtaaataatgaccctgaattacttggcggtgattcttttcatcttctgtgacgtatacataatcgacaagatttcctgggataacaacttcattcggttttagttgatagtcgtcaactaaagctttaacttgtacaataactttcccatgattggctttcgtgtttaatgcgacatgataacactcgctcaagtacgcttcttgagttaaataaatgttaccttgtggatctgcgtatgttcctctcagtagtgccacatcaacgctagggaatgtgtagtgtaagtatgtttcatcgttgatggttactaatgaaactaaatcatcagttgttcgtgtatttactttaccgccaccgtatctaggatcaacagctgtgtttaatccgattttagtaataactccaggtaataattgattactctgacgataatgagttgcaatgataccttgtggtaaaaaataagcttcaatgtcattatttttcattgcttgtgccgttttggaagaagccgttaaaatgctcataatgacacgtttaatcatacgacgttctataaaatcatctaaatccggtgcggcacctaaactatggatatcattcgctaatataaacgttaaatcattgggcgtatgatatgtgtcatgttgcgctaacacagcacgtagaacttcggcgggtaagttggctacagctaatgctggtaaaccaatcacatcaccatccttaatgatatgttgtaagtcgtgccatgtgatttgtttcaagcaagtcacctccatcacatttgataaaatatagcgtttttacactttgtgtaaacccttacaagaaatataacataacggcgtttaaaatcaattagaaatatctttttattctgataatagacacagtatagacacattttaatggtcgataacaattgtaatatcaagggtttgtaatgaattgaatatcattaaaatacttatataaaaatattgctcggaatataaaaagttaaataggttttgattttcaaatatggaatacaaggcgcccaatcgaacaaagtatttatattaaaatatggaaaatccatcaatattaaattaaaatagttttattataaaaagtgaaagtaggtaagtctatggaaggtcttaatcatcgaagaaatacagaaaaagaagagacaacacaaacgcaatcagttgcacctaatacaggtgaagaggtgatgtcatcagcaattacacaatcaactaagacgtccgacatacataatgaatctatcgataaacaaatggaagacaaagcgcatgaaacagctcaaaatgcagatttaaaaaatgaagcaagaagtttatttgataatgcaaccaaatcaatcggtagactagcgggcaatgatgaaagcttaaatcttaatttaaaagatatgttttctgaagtatttaagccacatactaaaaacgaagcagatgaaatatttatagcgggtactgctaaaactacgccagcaatttgtgacatatcagaagaatgggggaagccatggctcttttctcgagtattaatcgctttcacagtaacatttattggattatgggtcatggcagcgatttttaataacactaacgccattccgggtctcatttttataggagctttaacagtaccattatcgggtttgttcttcttttatgaatcaaatgcgtttaaaaatattagcatttttgaagttattatcatgttctttattggcggcgtattttcattactaagtacgatggtattatatagatttgtcgtttttagtgatcaattcgaaaggtttggttctttaacatttttcgatgcatttttagtaggattagttgaagaaactggaaaagcgctcattattgtttatttcgtcaataaattgaaaacaaataagattttgaatggattattaatcggtgctgctattggtgcagggttcgcagtttttgaatcagcaggttatattttgaatttcgctttaggggaaaatgtcccattattagatattgtcttcacacgtgcgtggactgcgattggtggtcatttagtttggtcagcgattgttggtgctgcaatagttattgtgaaagaacagcatggctttgaattcaaagatatttttgataaacgctttttaatattctttttatcagccgttggtttacatggcatttgggatacatctttaactatacttggcagtgatacgttgaaaatatttattttaatcgttattgtgtggatacttgtattcattttaatgggggcaggtttaaaacaagtgaatttactgcagaaagaatttaaagaacaacagaaaaaagtagacgaataataattaaagcttatgttgcgcatatgtttgtgacataagctatttttataattagtctttaaaagagtggaagtggaatacttttttggagttaaaaaagtgtttcacgttaaacaaatagtgacaattaggtttatataaaatgaacatgattcactgaaagtatgtaataatcattttattgaaattcatcaaacagaaattaatacaatcatataagcaaattaaaccacgccataatcatattgaatgacttcggcgtggtttttatagttgaagcagggctgagacataaatcaatgtcccacactctcttatcgttcaatcgttgttcgataatcgattaaatagataccttcaggtgttactttataatttttaaccttagagttagcagcgactatttgatcgttgtaagcaatataactgtttggtacatctcgacttgataatttaataatatcattagaaatattgtgacgttccttaacatctacagtgtgattcaattgattaattaaagcatcaacgttgctattattgtagtctcctttattaatagcaccatcttttttatatgcttgattaaagaaatagcctgtatctccacgaggaatcgttccgaaactatacatcgttgcatcccatgcagaacggtctgttaagtaaccttctatgtcatcaacacttttaatgtcgatttcaatattagcttttttagcatctgattgtaatacttgcgcaattttcgatagctctggacgaccgtcatacgtaattaacttaatttttaaaggttgttcttttgtataaccatctttagctaataacgtttttgcttgttcgatattttgtttggttaacttaggttctttaatatatggaattttatcattaaatggactcgttgcaggtttcgcgtaaccttgataaatatgatctgcaataccttgtctatcaatgatatgatctaatgcttcacgaacggatttagtcatttttttattagtatgattatacataattaaagaagttctaaatccagattcttttgacacttttaaattttgattgttttctatgtcttgaactttattaactgggacatcagttattaaatcatctttttgagattctaaatttctgacgcgattattgccgtcttcttggtacgtcacagtaatatgatcaagtttcggtttaccttgccaatagtccttaaaattcgacaatgatatttttcgagattgcttataatcttttatttggtaagggcctgtaccaacaggagtttgattaacatctgatttagcatctgtatcataaattgccataaaaggattagctaattcagatacaagttcagggtaagcggagctggttttaattgtcagtttttgacctttagcggtaattgatgatattggtaatgaatatttgaccaagtcgctttttttcatgctattttcaaggctagatttcactttttctgcagtcaatttttgaccgttttgaaatttaatattatcttttaattctatatctaacgttgtatcatttggttgatgatacgatttcactaatactttttctatttttccttgatcatttgttttaaataatgattctgcagcaccaatcttaactggtacatctgtttcataaggtgcaatagactttgtttttaacggtaacgaaatatttaagtctttgccagatgaatgcattgagccacatcctgataacactaatactgcagaaaatatagttgctagtcttttaaacttcatttcattaacactctctttctaattactatgtaaaacccaataattaatattttaaaactttattttgttaaagtaaaatgttgttcaagtttagtaattatcaaagttcaattaattgtagtaattatgctttttaaaaataaatattagaaatgaagttagcgacatgtatagtgattcacgataaacatatatacctaagtattgagcagctgctgtagtactacagcttggttatgtttagtatcttttgctgcatataacaatagaacatgattatgctgatttacaatatcctttaatttttcaaaagcatctttttgtgcatcctgatcacgtaattctttttcgtatttttctttaaaagctccaaaaagtttaggatcatgttggaaccattgtcgcaactcagtagaaggggcaatgtcttttaaccaataatctaggtttgcagttcttttcgaaatacctcttggccagactctatcgactaggatacgaatagcgtcggtattatctttattgtcataaatccgtccaatatctacggtcatcttgtgaactcctttcttatgaaattcagtgagcatacgtcaatgcatgttggggtgggacgacgaaataaattttgcgaaaatatcatttctgtccaactcccaattaaaaaacagccatgacaaagtaaagtcatagctgtttttgtatagatgtcatttatttttacgtttagttaaatacttcaaaccaattgcaaagaccgtgtacccggctatggtttgtatcaatgttttaattaaattattatttttaacaataatatttgcagtaacaatacttacgaaatataatgcaaatacttttacgtaacgttgattaagtttcatatgagcactaaacctcttttctcagttatactgcaacgcttagtcttggaataaatgtttcgtagtgtacgcgatccatatcgtaatttaaagatttaagtgcttcgatcatagattgtaagaattttgtaccaccacagatataaatttcaggtttatttgctaaaaatacttgtaattcttcagcgccaatatagccttgtttatcttttaagtgagtatataacttagcgttgtcatgatggcttgcgatactgttgaagttgtctttgaaaggtaaatgttgttcattttcagcaacttgaaccatctgtgtatctaaacctttggcagaggcagcttcatacattgctactaaaggtgtgacgccaatacctgaacctaagaaaagttgtggttcagtcgtattctctaatacgaatccacctacaggcgcagctagattaatcgtatcgccttctttaatctcatcgtgtaaaattgttgaaacttcgccttcatgttctgttgtgacatcacgtttaacgccaaaagttaaatggtttttatcacctgatacgatagaatagtgacgtttagctctatatggaagtttatcactagaaacatcaactgtgatgtattggcctggtgtaaattcactaaagtcatattcttcagtttcaactgtaaatgatttaatgtcttcagattcttgtttaatattggtaattttgaatggtttaaaaccaatccacatcatttgatcataaatttctttttcaatttggatgaacacatccgcaataacgccatatgctttcgcccaagcttgaatgacagggtcattttcttctaatcctgtcacgtcttgaatggcttttaataaattttcccccacaattggataatgttcagcataaacttgtagtgcgcagtgtttatatgcaactggcataatgactggtttaataatacttaaattatcgatgttaacagctgcagccattactgcttgtgctaatgctgaagattgcatgcctcttttttggttcgtttgattaaacatatttaaaagttcaggatgtgccttaaacattttcggataaaaagttgacgtaatttctgttcctttttctttaagcaatggcaccgtttgtttgattatgtctttctcttgttctgtaagcatgatactcctcctttaatctgtctattttgattattctactaaaaatttcgatattcaattaattggtttgagaaaatataaataaaatggcaaatttgataattgtatgacatttttaattttttaaatacttatcaataagcattgtgtacaattgtctgtttgtacaccgacgattgcgcgcatttatttgactaattcaaaaaacattgttgttttcttagaaaaaagtaaacatgataataaaaatgtgaaagtgtaaataatcactggcgaagtacgaagactaaagacgtctaagatgtaatcgtatacaaattaaaaaggtgtaaaaattaaaataaaatgtgaaataaatcacaatttaatattgacccagtacttaatgcatgttacattttatatgtgaaataaatcacaaacttaaaagcggatgacacatgaccttttaagttatgcgttgaaaataaaagagatgtttatttgcttttgtatcgtcaataagcagcattaaactaacatatttgaaactacatgtatgttagtgaattaatcataagggagtttttgtaatgaacaaatttaaagggaacaaagttgtattaataggtaatggtgcagtaggttcaagctacgcattttcattagtgaaccaaagcattgttgatgaattagtcatcattgatttagacactgaaaaagttcgaggagatgttatggatttaaaacatgccacaccatattctccaacaacagttcgtgtgaaagctggcgaatacagtgattgtcatgatgcggatctagttgtcatctgtgctggtgctgcacaaaaacctggagaaacacgtttagatttagtatctaaaaacttgaaaatatttaaatcaattgttggtgaagtaatggcatcaaaatttgatggtattttcttggtagctacaaatcctgttgatattttagggtatgcaacatggaaattctctggtttacctaaagaacgtgttataggttctggtacaattttagactctgcacgctttagattattgttaagcgaagcgttcgatgttgcgccacgtagcgtcgatgctcaaattattggtgaacatggtgacactgaattaccagtatggtcacacgctaatattgcgggtcaacctttgaagacattacttgaacaacgtcctgagggcaaagcgcaaattgaacaaatttttgttcaaacacgtgatgcagcatatgacattattaaagctaaaggtgccacttattatggtgttgcaatgggattagctagaattactgaagcgattttcagaaatgaagatgccgtattgactgtatcagcattattagaaggcgaatatgatgaagaagatgtttatattggtgttccagcagtcatcaatagaaacggtattcgcaacgtcgtagaaatcccattaaacgacgaagaacaaagcaagttcgcacattcagctaaaacattaaaagatattatggctgaagcagaagaacttaaataactttttataaaatctataccattccaaaaattgtaaaaccttaccccaaaaaattgtataaagggctatttgatacaactatatgtgtcgagtagccctatttttaatgtagtgaaagtcgttgttgaaattaaattcaaatctggcacttaagctttaatcatagcattaagatgattgtctagcagaggcgatttgcgggcttactacagtacatgatgaacttaatgcttcaaatgtaacattaaaaataaaagcaacgatgtcacttcttacttcgtacatcgttgccattagttctgttgatatttcggttagtcttaatccccgagcaattcttcaatttcatttttgataactgtaacgtgaggcccataaattacttgcacaccagtgccttgctggattacacctttggcatcagtactttcgagtaatactttatcgactttgtcattttgatgaagtgtgacgcgtagtctcgttgcacaacagtcaacgatttcaatgttatcttcgcctcccaaaccagcaacaatagtttgtgctctttcagtagcctcaacttgttgtgctgcaactttatcttcacgaccaggtgttttgaaattaaatttcgtaattaagaatctgaaaacgatgtaatacaaacagaaccacacaattccaataggtatgacgtataggtagtttgttttactattaccttgtagcacaccaaaaagtaagaaatcgataaagcctccactgaaggtttgaccaattgtaatgttgaaaatgtctgccatcataaatgctaatccatcaaagaaggcatggattacataaagaataggtgcgacaaacaggaaactaaactctaaaggttcggtaatacctgttaaaaatgaagtgagtgcagcggataacattaaaccgccgacaacttttttatgttcaggtttagctgtgtgataaattgcaagtgcggcaccacataagccgaacatcatcgtaataaaacggcctgacataaagcgtgacacacctgaataatacttcgtcacatctggatcaccaagttgagcaaagaagatgttctgcgtaccttgaactaagtgccctttgacttctaaagtaccaccaagtgccgtctgccaaaacggtaagtaaaaaatatgatgtaaaccgagtggacctaacaatcttaagatgaagccataaacaaaagtaccgatggcacctgttttcgttacaaatccaccaacatgataaatgccggcttgtatgcttggccaaatgaaaaacatcaatacacctaaaaagattgcggcaaatgctgtgacaatagggacaaatctagagccaccaaagaaacctaaatacggtggtaataccactttgtgatatttgttgtgaagtattgcggtcataatacctgtgataatcccgccaaaaacaccggtttcaaccgtttgtataccgagcaccatgccttgtccattttgtgcaagctgatcttttgccaatgtgcccgtgatagttaataagccattcatagttgcgttcataattaagaaaccgagcagtgcagctaaacctgcagtacctttatcgcttctagataatccgattgcgacaccaattgcaaagatgactggtaaattttggaaaacaatactacctgcagctgacattaatgtaaaaatattttgtaataaggtaatatctaaaatagggtatgctttaacggtgtttggattacttaatgcaccaccgatacccaacaatagacctgcagctggtaagattgcgataggtaacataaaggacttgccgaactgctgtgctttttcaaataaagatttcatcaacatccctcctaattattctcaatatagcttttgagaaatttaatatcaatatatattctgtggatgaaaatatttttcataaaaattgtttgaatcatgtaacaatcatataaattgttgtttatattgttgtgaaaatgagttgacaaaagtcgtatagatctgtagacatcctattttttagcgaggtagggtgacaaagcatatcggataaatttataaaccataaaatagataaatagtgtttgtatccaaaactatgagaaagttaaaactatttttcaaaataaacatgattcaccacataaataaatatacataagctatcgataacaacttaagaaaggtggatatataaatgaaaagaaagattgttatggattgtgatccaggacacgatgatgcaatagcattaattttagcgggggcaattgacagtccactagagatattagctgtaaccacagtcgcaggtaatcaatcagttgacaagaatacgacaaacgccttgaacgtattggatattatgggacgccaagatatagcagtagcgaaaggtgcggataggccgttaattaaaccagctgcctttgcttctgaaatacatggggaatctggattagatggtccgaaactaccgtcgacaccatcacgtcaagcagttgcaatgccagcatcagatgtgattattaacaaagtgatgacgagtgatacacctgtaacaattgtagcgacaggtcctcttacgaatttagcaacggcattgattcgtgaaccaagaatcgctgagcatattgaatcaattactttgatgggtggtggtacatttggaaattggacgcctacagcagaattcaatatttgggtagatgctgaagcagcgaagcgtgtttttgaaagtgggattactataaatgtgtttggtttagatgtaacacatcaagttttagccgacgatcacgtgattgaacgctttgaaagtatcaataatcctgttgcacagttcgtcgtagaattattgcaattctttaagaaaacatacaagactcactttaatatggacggtggtccaatacatgatgcttgtacaattttgtatttgttacaaccagaattgtttacaatggtacccgttaatatcgatattgaacatcaaagtccactaacttatggcactatggctgtcgatttaaatcatgttacaggtaagcctgctaatgcttattttgctacagcagttgatgttgaagaagtgtggaacttgatagatcataagttacgtacatacgaataataatacttaattaaatagatacagttagccctaaggtgcctgatttaagcgtccttagggtttttgtattggattacaatggtcatgacaatttgataatgattgagatatgtatgttaaaaatgcttcaaaaaacacaaaatacaaaaatatatgcaaaaatttcaattgctttattttaaaagattaaaatcacaaaaaatatagatataattgaaatgttgttaaaacatcacaatgatgtacatgctcattttgaaaatatgtgttcaaagtgtgtacatcggtgtgacgattgatgataaattgagctcagatgctcaaaggaggatcgaacatgaacggggataatcagcaaatactcagagaaattgtattgaatcctactattcatggtaaagaacttgaatcgatatttggtttgtctcgtagacaacttggatatcgcattcaaaaaatcaatttgtggcttgaacaagagggttatccaaaacttgaaagaacaagccaagggaattttattgtaagttctgaaatcatgacgttattcaagcgagatgtatcagagcagcaaatgttaaacggcaacaatgtcatttttagcatagaaacacgtcgttattatttaatgctcatgctttttagtaaggaaaacgcaatgtctctaaaccatttttcaattgatttacaagtcagtaaaaatactgtcattcacgatataaatcatgtgaaagagcaattggaaaatcatggtttgtcacttaagtattctcgaaaacatggttatgaaattgttggtgatgaatttgaagttcgccgtttcttcattaagttgattgatcaaaggttgaatcatgatattactaaaagtgaagttttaaaggcgctcaacttaacattcgaagatatcgcatatcaaaaagacaagatcaaacaggtagaacaatttttgaagagtcgctttatagacaaatcacttagttcattgccttatgtcctttgtgtgattcgtagacgaattcaaagtggtcatgtgattaatccattaaatattaattatcagtatttgagggatacgaaagaatatcaagcaacggagattatgacgcaacatgagccggatttgccagaagcggaaaagttatatttgacattacacttactttcaacaagtgtgcaatggactgatttgcaggaatcagataacatatcgaatttaacgatggccatcgctcaaatgattcaccattttgaacaaatcacttttattaacattgaagataaggagaaattatcacagcaactcttgttacatttaacgcctgctttttataggattaaatataacttaacggatcgtgatgaattaataaatcctttacaaggaaattatcaatccttatttcatatggtgaaacaatcatgtcaatcgttaactgaatatttcggaaaatcattgcctgataatgaaatagcatatttaaccatgttgttcggaggtagtttgagacgtcaagatgaaaacttcgatggcaagataaaagctattatcgtgtgtacacaaggcacgtcagtatcgcaaatgatgttatacgagttgcgaaacttatttccagaaattattttcttagatgcgatttcacttagaacatttgaaaactacacattagattatgacatcgtcttttcaccaatgtttgtcttaacacataaaaaattatttatcacaaaagtagctttatctgaaaatgagcaacgaaagttacgtaaagaagtgatgaagtacattaataaggaatcggctgacattgataaggaaataaacaagttaatggcattaattgaacgcacaacgacagttaatgacattacagaactacgtgatggtttagaagattttattgcgaattataattcaatttcaactattaatggatcgattgtcacacaaaataagacattagatttagctgacttgataccagcaaggcacgtgaaaagaatacatcatgttgaaaatattgatgaagctattgctaaagcaagtgatgtgttagttgctaatcattttattgatattaaatatattcatgagatgcaacaggcatttgatgattcgtatatggttatcatgcaaaatattgctattccacatgcatattctgaaaagcatgtacataaaacagcgatgagtatgttgatattacaagaaccaatatacatgtcagatggcacagcaatccatattattgtacctattgctgctgttgataaagtgacacacttaagagcgttactacaattgagagatgtggcgcaagacaatgacgcaattaagcgcatcatacaaagtcgcaaaaattctgatgttaatgagattttaaaaaattattcaaataaagaagcgagggaaaatggatgggacagcaattagtgcataaagaaaatataatgctcaatttgtcggcaactgataaagaatccgtattgtcacaaatgtcagatgtgttatttcaaaatgggttcgtgaagtcaacgtttaaagatgcagtcatcgacagagaaaaagagtttgctactggtttaccaacgcatctgtgttcggtcgctataccgcatacagatgtcgaacatattaaccatagaacgataggtgtggctgttctagaaaaagaagtgccgtttattgaaatgggaacacttgatcaacagacagaagtgaaaatcgtttttatgttagcaatggataaagtagatgatcaacttaagctgttacaacagttgatgcaaatttttcaaagtgaagaaaaattggagcagattctgcgaacgaaagatgaaacaattttagcaacactaatcaatgattatttggaatataactaaaaattaattggaggaattgaaaatgaaacaagtattagtagcgtgtggtgcaggtattgcaacgtcaacagtagtaaataatgcaattgaggaaatggcaaaggaacacaatattaaagtagatattaaacaaatcaaaattacagaagttggaccttatgaagacactgcagatttattagttacaactgcaatgacaaagaaagaatataaattcccagttatcaacgcacgtaatttcttaactggtattggtattgaagaaacaaaacaacaaatcttaacagagttacaaaaataactgaattgatatgtaatgtgggtcaataacatataaatatatgcaaattgcatataaatgactatcacgacaaatgattgttgatgacatagaaacgcagtgactgtaattcaaagggattgcagtcgaatgtagcaagggttgtcgttgaaatgactgtaacgtcaaatgtaatcacaatcggaaagtatcgtgacaatgcatatataacagggagggtttaaatatgagttacttcactgattttgtaaggggatttttagatttaggtgcaactgttattttaccggttgtcatattcttgcttggcctattctttaggcagaaaattggagcggcatttaggtctggtttaacaataggtgtggcttttgtagggattttcttagtcatcgatttattagttaaaaatttagggccagcagcacaagcgatggttaaaaatttaggcgtcagtctgaatgtgattgatgtaggttggccagcaacatcatctatcgcgtgggcatcatctgtcgcagcatttattattccactcggaatcatagttaacgttgtattgctagtaactaaagtgacaaagacgatgaatgtagatatttggaatttttggcattatacgtttacagcagcaatggtttatgccgtatcaggcagtatttggcaagcgttattagcagcagttattttccaagttatctgtttgaaagtagcagattggacagcaccgatgatgagtgagttctttgatttaccaggtgtatcgattgctacaggaagtacaatttcttatgcaccaggtatttacttagttaaattgctacaaagagtacccggtctgaataagttagatgctgatcctgaaacaattcaaaaacgttttggcgcatttggagagtctatctttgtcggattaattttaggtttaggtattggtgtgttagcaggttacaaacctggagacatcattaatttaggaatgtcaatggctgcagtaatggtattaatgcctagaatggtaaaaatcttaatggaaggtttaatgccagtttcagagtctgcaagaacatggctaaataaacgttttggcgaacatgaaatttatattggattggatgcggctgtagcattaggtcatccagcggttatttcgacagcattaattttagtacctatcactgttttattagccgttattttaccaggaaaccaagtactaccttttggtgacttagcaactataccatttgttgtcgcgtttattgttggtgcagcaagaggaaacattattcattctgtcattgtgggtacgattatgattgcaatttcactatatattgcaacagacgtagcacctattttcacagatatggcgaaaggtacgaatgtacaaatgccaaaaggttcatctgaaatttcaagtattgatcaaggtggtaatatcgttaactatcttatctttaaactatttagtctattcaattaaaaatcgaggtgtttgtggtgaaagctttagtaaaaacaagagaaggacatggcaacttagaacttcttgataaagaagttgcaacaccgctagatgataaagtaaagattaaagtacattatgcaggaatttgtggcacagatattcatacttatgaaggtcattataaagttaattttccagtgacattaggtcatgaattttctggtgaaatcgttgaagttggagcagacgttaaagattttaaagttggtgaccgtgtcacttctgaaacgacattctatgtttgtaatgagtgtgaatactgtgaatcaaaagactataatttatgcaaccatcgaaaaggtattggaacacaagttgatggcgcatttactaattatgtcattgcacgtgaagaaagtttgcatcatattccagatgaagtatcgtatcagtctgcagctatgacagaaccattagcatgtgcacatcatggcgtttctaagattcaagtgaactctggcgatgtagcagttgtaatgggacctgggccaatcggattacttgtagcacaagtgttaaaaagtaaaggcgcaactgttgtggtaactggattggacaatgacaaagtcagattagataaagcagaagcattgcacatggattatgtagtcaatttacaacaaacagacttaaaaacgtatatcaatggaattacagacggttacggagcagatgttgttgttgaatgttcaggtgcagttccagcagcacgacaaggtttggatattttacgtaaaaaaggtttctacagtcaaataggtatttttaaggatgctgaaattccatttgatatggaaaaagtgattcaaaaagaaataacagttgttggtagtagaagtcaaaagccagcagattgggaaccttcattgcaacttatggcggatggtttagtaaatgctgaagctttggtgacaaaaatatatgatatttcgaaatgggacgaggcgtatcaacatttaaaatctggcgaaggtattaaagcattacttaagccgctcgatttagatgaaaatgaaggagagaattaatatggtagaatcaatgctaacttttatgcttgggccattgagacaaatcactgatttttatatggaacatttactcgtaagtaattctatcgtcattgcaggttattttgcgacaggtatttttaaaaagaaaaaagttgtgaattaaatcaaatttgaggtgatttacaagtgaaagctttgaaattatatggcgtggaagatttacggtatgaggataatgaaaagccagtcattgaaagtgcgaatgacgttattgttaaagtacgagcgactggcatatgtggttcagacacgtcacgatacaaaaaaatggggccatacattaaaggtatgccatttggtcatgaattttcaggtgttgtagatgccattggaagtgatgttacgcatgttaatgtaggcgacaaagtgacaggttgcccagcaataccttgttatcaatgcgagtattgtttaaaaggtgaatatgcacgatgtgaaaagttgttcgtcattggctcatatgaacctggatcgttcgcggaatatgtcaaattgccagcgcaaaatgttttaaaggtaccagacaatgttgattacattgaagcagcaatggttgagccatcagccgttgttgcgcatgggttttataaatcgaatatacaacctggtatgactgttgcagtaatggggtgtggcagtataggattgttagctattcaatgggcacgaatatttggtgctgcgcatatcatcgctatagatatagatgcgcataaactagatattgcaacatcattgggcgcacatcaaacaattaattcaaaagaagaaaatcttgagaaattcatcgaaaatcattacgccaatcaaatcgatttagctatagaatcatcaggtgctaaagttacgattggtcaaatattgacgctaccgaaaaaaggtggcgaggtggtattactcggaataccatatgatgatattgagattgatcgcgttcattttgaaaaaattctgcgtaacgagttgacagtatgtggctcttggaactgtttgtccagtaattttccggggaaagagtggacggcaaccttacattatatgaagacgaaagatattaatgtaaagcctattatttctcattttttaccgttagaaaaaggcccggagacatttgataaattagttaacaagaaagaacgatttgataaagtcatgtttacgatttattagtatgcacctttgaggacgaaaacgctggtatagttatagctatgaaagtacgaatgccgtctggtctacagatactatcgaaataattcatcttcgaatatacgttgctaaataaccggtttacttgtgtgaaatatgcttgtgaatcggttgttttgcattttgtatacttaaaatgagatggcaatatttgatgatttttagagtgaaaatcaagtacagctacttaataagataaatttattataatatatggtaaaatgatggcagtaataatgaatttgaaaaagagtaaacattaatacctttaacaatttaatatcgtcagtgttaatgattaactgcatggcaaaacaacttagaatggtcagttacaaaaatacatttttataaaaaattatcacactattgtgacaactacctttgacttaataaaagaggcaagtgagcaataggttaggcttatgtgcgggcataggtcagtaatgtataaatggaaatgatgtaatgacagaatggaggacaacatgatttatgcaggtattttagcaggaggtattggttcgagaatgggaaacgtgccattaccaaaacaatttttagatattgataataaaccgattttaatccatacaattgagaagttcattttagtgagtgaatttaatgagattattatcgcaacgccagcacagtggatttcccatacacaggatattttaaaaaaatataacattacagatcaacgtgtcaaagtagttgcaggtggtacggatcgaaacgaaacaattatgaacattatcgaccatattcgcaatgtaaatggaattaataatgatgatgtgattgtaactcatgatgccgtaagaccatttttaactcaacgtattattaaagagaacattgaagtagcagccaaatatggtgcagtagatacagtcattgaagcaattgatacgattgtaatgtctaaagataaacagaacatacacagtatccctgtaaggaatgaaatgtatcaaggccaaacaccacaatcatttaatattaaattattacaagatagttatcgcgccttaagtagtgcacaaaaagaaatcttatcagatgcatgtaaaatcattgtcgaatctggacatgcagttaaattggtacgtggagaactctacaacattaaagtgacaacaccgtatgatttaaaagtagcaaatgccattattcaaggtgatattgccgatgattaatcaagtatatcaactcgttgcaccgagacagttcgacgtcacatataataatgttgatatttatggtaatcatgtcatcgtaagacctttatacttgtctatttgtgcagctgatcaaaggtattacacaggtcgaagagatgaaaatgtactgcgcaaaaaattaccaatgtcattagttcatgaagctgttggtgaagttgtatttgatagtaaaggggtatttgaaaaaggtacgaaagtagtaatggtaccgaatacacctacagagcaacatcatattattgcggagaattacttagcctctagttattttagatctagtggttatgatggttttatgcaagactacgttgtgatggcacatgatcgtatcgttccgctgcctaatgacattgatttgagtacgatttcatacacagagttagtgtcagtaagttatcatgctatacaacgatttgaacgtaaatctatacctttgaaaaccagctttggtatttggggtgatggtaacttaggttatattactgctattttgctacgtaagttgtacccagaagctaaaatttatgtatttggtaagacagactataaattaagtcatttttcatttgtagatgacatctttacagtaaatcaaataccagatgatcttaaaattgatcatgcatttgaatgtgttggaggtaaaggaagtcaagttgcacttcaacaaatagttgaacatatttcaccagaaggcagtattgctttgttaggcgtaagtgaattacccgtggaagtgaatacacgattagtacttgaaaaaggattaacattgattggtagtagtcgaagcggctctaaagattttgagcaagttgttgatttatatcgtaagtacccagacattgttgaaaagttagcattattaaaaggacatgaaattaatgtatgtacgatgcaagatatcgtccaagcgtttgaaatggatttatcgacatcttggggaaaaacagtattgaaatggacgatttaataaaccgatgggggaataacaatgacaaaaacgaaacaagcaatacatattgataacatatactgggaacgtgttcagttatatattgaaggacatagtgaaggcgtagatttaacatcaggacaatttgttctgaggaatttaaccgaaacaaaaacattagaagcaaatgaaatgaaaatagacggtaatacatttatatgtagattcaacgtcgcaatattagacgatgggtattatttaccaatggataaatatttatttgtttatcatgaccagttagagtatattggacaacttaatccaaatattattgatcaagcttatgcggcattaaatgaagagcaaattgaagaatacaatgagctgactacacaaaatggaaaagcaaactatgtgttagccaacgaagctaaagttttccgcaaaggtggcgtatcacaacatacggtttataccattactccagaaatagcaagtgacgttaacgaatttgtatttgatattgaaatcaccttacctcaagagaaatcaggggtcattgcgacaagcgcacactggcttcataaacaaggccgtaaagcttcatttgaaagtagaagtttcttatttaaagctatttttaatattacaaagttactacatattaaaagaagcaaaacaatattattcacatcagattcgcgtccgaatttatcagggaatttcaagtatgtatatgatgagttgctacgccaaaaagtagattttgattacgatattcaaacagtatttaaggcgaatattacggatagacgtaaatggagagacaagtttagattgccatatttacttggtaaggccgattatatttttgtcgatgatttccatccattaatttatacggttcgctttagaccatcacaagaaattattcaagtgtggcatgccgttggtgcttttaaaacagttggctttagtcgtacaggtaaaaaaggtggtccgtttatcgattcattaaaccatcgtagttacacgaaagcatatgtttcatcagaaaccgatattccattttatgctgaagcatttggaattagagaagaaaatgttgtaccaacaggtgtaccacgtactgatgtactatttgatgaagcttatgcaacacaaattaaacaagagatggaagatgaattgccaattataaaaggtaagaaagttattctattcgcaccgacatttagaggtaatggtcacggtacggcacattatccattttttaaaattgatttcgaacgtttagcaagatactgtgaaaaaaataatgcggttgtattatttaaaatgcatccatttgtaaaaaatagactcaatatttcacgtgaacatagacaatactttatcgatgtatcagattatcgtgaagtcaatgatattctctttgttacagacttgttgattagtgattattcatctttaatatatgaatatgcagtatttaaaaagccaatgattttctatgcatttgacttagaagattatattacgacgcgtgatttctatgaaccatatgaatcatttgttccaggtaaaattgtacaatcctttgatgcattaatggatgctttggacaatgaagattatgaggttgaaaaagttgtgccattcttagataaacattttaaatatcaagatggtcgctcaagtgaacgtttagtcaaagatttgtttagacgctaatgttggcatatattacttgccatgcaaatgagtcataaggcatagttttcaagaagggttctgacaatgaagtgagtaacatgtcatgatgagaagcaggactacacaatgagaataaccttttaatttttcatgcataaggcgattcaatcaaaagcaatcaccttccaattgaattgtcattttgtaaaataaaataatcaatccaatcgttatctaattcataaatgtgtaaacacatacgttatgaatggataacgattttttgttatgttaaagtggtacattaatcatgtatttcgtatgataattaacgacaagtgtaatggttaaatgtattttatgatgaaatgctataataggcatggttacaatgagcttgctcatacgtattaatataattacaaaaacacgtcggaggtacgacatgattaaaactacaattaaaaaattgatagaacacagtatatatacgacttttaaattactatcaaaattgccaaacaagaatctaatttattttgaaagttttcatggtaaacaatacagcgacaaccccaaagcattatatgaatacttaactgaacatagcgatgcccaattaatatggggtgtgaaaaaaggatatgaacacatattccaacagcacaatgtaccatatgttacaaagttttcaatgaaatggtttttagcgatgccaagagcgaaagcgtggatgattaacacacgtacaccagattggttatataaatcaccgcgaacgacgtacatacaaacatggcatggcacgccattgaaaaagattggtttggatattagtaacgttaaaatgctaggaacaaatactcaaaattaccaagatggctttaaaaaagaaagccaacgttgggattatctagtgtcacctaatccatattcgacatcgatatttcaacatgcatttcatgttagtcgagataagattttggaaacaggttatccaagaaatgataaattatcacataaacgcaatgatactgaatatattaacggtattaagacaagattaaatattccattagataaaaaagtgattatgtatgcgccaacttggcgtgacgatgaagcgattcgagaaggttcatatcaatttaatgttaactttgatatagaagctttgcgtcaagcgctggatgatgattatgtcattttattacgcatgcattatttagttgtgacacgtattgatgaacatgatgattttgtgaaagacgtttcagattatgaagacatttcggatttatacttaatcagcgatgcgttagttaccgactactcatctgtcatgttcgacttcggtgtattaaagcgtccgcaaattttctatgcgtatgacttagataaatacggcgatgagcttagaggtttttacatggattataaaaaagagttgccaggtccaattgttgaaaatcaaacagcactcattgatgcattaaaacaaatcgatgagactgcaaatgagtatattgaagcacgaacggtattttatcagaaattctgttcattagaagatggacacgcgtcacaacgaatttgccaaacgatttttaagtgataacttaaaaacaataaaaaattataaattaattagttaagtgatataaataataaacgaaatgtttgcttgtatgttattatttgtgtatgaaaacgtctgatataatgtaatataggtttaaacaaaatatgctaaaatataagcaaaatatgtataattttaagtaatacacagacatttagagttttgattttaaaatgagttttcaattgaaaaatgcaacgaaatttaaataattaaatatagatatagttgaatggaggaagtattttatgaaatacgctggtattctagctggaggtataggctcaagaatgggtaacgtacctttacctaaacaatttttagatttagacaacaaaccgattttaatccatacattagaaaaatttattttaattaatgattttgaaaaaattattatcgcgacgccacaacaatggatgacgcatacgaaagatacacttagaaaattcaaaatttctgatgaaagaattgaagtcattcaaggtggtagcgatcgtaacgatacaattatgaatatcgttaaacatattgaatcaacaaatggtattaacgatgacgatgtcattgtgacacatgatgcagttagaccatttttaacgcaccgtattattaaagaaaatattcaagctgctttagagtacggtgcagtagatacagtgattgatgctatagatacgattgttacatctaaagataatcaaacgattgatgcaattccagtgcgtaatgaaatgtaccaaggtcaaacacctcaatcgtttaatattaatttattaaaagaaagctatgcacagttgagtgatgagcaaaagagtattttatctgatgcttgtaagattattgtagaaacaaacaaaccggttcgacttgtaaaaggtgagttatataacattaaagtaacaacaccttacgatttaaaagtagcgaatgctattattcgaggtggtattgccgatgattaatcaagtatatcaattagttgcacctagacaatttgaagttacgtataacaacgtagatatttacagtgactatgtcattgtacgtcctttatatatgtcaatttgtgctgccgatcaaagatattatactggtagccgtgatgagaatgtcttatctcagaaattgccaatgtctttaattcatgaaggtgttggtgaggtcgtatttgacagtaaaggtgtgtttaataaaggtacaaaagtagttatggtaccgaatacgccgacagaaaaagacgatgtcattgctgaaaactatttaaaatcgagctacttcagatcaagtggacatgatgggtttatgcaagattttgtgttgctaaatcatgatagagctgtaccactacctgatgatattgatttaagtattatttcatatacagagcttgtaacagtaagtttgcatgctattcgtcgttttgaaaagaaatctatttcaaataaaaatacatttggtatttggggtgatggtaacttaggttacattacagccattttattacgtaaattatatccagagtctaaaatatatgtctttggtaaaacagattataaattgagtcacttctcatttgttgatgatgtcttctttattaataaaatacctgaaggcttaacatttgatcatgcatttgagtgcgttggtgggcgtggtagccaatcagcaataaatcaaatgattgattatatttcaccagaaggaagcattgcactgttaggtgtaagtgagttcccagtagaagttaatacacgtctagtattggaaaaaggactaacgttgattggtagtagtcgaagtggttcaaaagatttccaagatgttgtagacttatacattcaatacccagatattgtagataaattagcgttgttaaaaggtcaagaatttgaaattgcaacaattaatgatcttacagaagcttttgaagcagacctgtctacatcttggggtaaaacagtattaaaatggattatgtaaatagaaaaggatgaattaacgttggttaaaagtaagatatatatagataaaatctattgggaacgtgttcagttattcgttgaaggacatagtgaaaacctagatttagaagatagtaattttgtattaagaaatttaactgagacacgtacaatgaaggcgaatgatgtcaaaatagatgggaatcaattcgtttgtcgtttcaatgtagctatcttagataatggttattacttacctgaagataagtacttattagtgaatgagcaagaacttgattatattgcacagttaaacccagatgtgattaatgatgcatatcaaaatctaaagccagaacaagaagaagaatacaacgaattagaaacacaaaatggtaaaatcaatttcttattgcagacttacctaaaagaatttagaaaaggcggcatttcaaagaaaacggtttatactgttacacctgaaatttctagcgatgttaatgaatttgtccttgatgttgttgtaacgactccggaagttaaaagtatttatatcgttcgtaaatataaagaattacgtaagtatttccgcaaacaatcatttaatacaagacaatttatttttaaagcgatatttaatacgacgaaatttttccacttgaaaaaagggaatacggtgttgttcacatcagactctagaccaacgatgtctggaaactttgaatacatctataacgaaatgttacgtcaaaatttagataaaaagtatgatattcacactgtttttaaagcgaatattacagatagacgtggcatcatcgacaagtttagattgccatatttacttgggaaggcagactacatctttgttgatgactttcacccattgatttatacagtgcgttttagacgttctcaagaagttattcaagtatggcatgccgttggtgcctttaaaacagttggctttagtcgtactggtaaaaagggtggaccatttattgattcattaaatcatcgtagctatacaaaagcttatgtatcatctgaaaccgatattccattctacgctgaagcatttggtattaaagagaaaaatgtagtgcctacaggtgttccacgtactgatgtactatttgatgaagcttatgcgacacagatcaaacaagagatggaagatgaattaccaattattaaaggtaagaaagtcattcttttcgcaccaacatttagaggtagtggtcatggtacagcacattacccatttttcaaaattgatttcgaacgtttagcaagatattgcgaaaaaaataacgcggttgtattatttaaaatgcatccatttgtgaaaaatagacttaatattgcagacaaacataaacaatattttgttgacgtttctgactttagagaagttaatgatatactgttcataacagatttattaattagtgactattcatctttaatatatgaatatgcagtatttaaaaagccaatgattttctatgcatttgatttagaagattatattacgacgcgtgatttttatgagccatatgaatcatttgttccaggtaaaattgtgcaatcatttgacgcattaatggacgccttggacaatgaagattatgaaggagaaaaagtcattccattcttagataaacattttaaatatcaagatggtcgatcaagtgagcgtttagtcagaaatttatttggtagctaagtttatatagtagtcaaagtgggagaggtataatgatgaaattttcagtaatagttccaacatacaattcagaaaagtatataacagaattacttaatagccttgcgaaacaagattttccgaaaactgaatttgaagtggttgtagttgatgactgttcaacagatcaaacgttacaaatagttgaaaagtatcgtaataaattgaacttgaaagtaagtcaactcgaaacaaattctggtggtccaggtaaacctagaaatgtggcgttaaaacaagcagaaggtgaatttgtattatttgtggactccgatgactatataaacaaagagactttaaaggatgcagcagcatttattgatgaacatcactcagatgttttattgattaaaatgaaaggtgttaatggtcgtggtgtaccacaatctatgtttaaagaaacagcacctgaagttactttgttaaattcaagaattatctatactttaagcccgactaaaatctatagaacagcattactaaaagataatgacatatattttccagaagaattaaagagtgcagaagatcaattatttacaatgaaagcatatttgaatgcaaatcgaatcagtgtgttaagtgataaagcgtattattatgctacaaagcgtgaaggtgaacatatgagtagtgcgtatgtttcacctgaagacttttacgaagtcatgagattgattgctgtagaaatattaaatgcagatttagaagaagcccataaagatcaaatcttagcagaatttttaaatcgtcattttagtttttctcgtacaaatggcttctcacttaaagttaaactagaagagcaaccacaatggattaattgttgcactacgcgagagcgaaagatatagacaactatagaactgtagaagaaagttaccgtcaaggtcaatactaccgttttgatattgtagatggtaaattaaacattcaattcaatgaaggcgaaccatactttgaaggcattgatatcgctaagccaaaagtgaaaatgacagcatttaaatttgataatcataaaattgttacagagctaacgctaaatgaatttatgattggtgaaggacattatgatgtcagacttaaattacattcacgaaacaagaagcatacaatgtatgtacctttaagtgtcaatgcgaataaacaatatcgttttaacattatgttagaagatattaaagcgtatttacctaaagaaaaaatttgggatgttttcttagaagtccaaataggtacggaagtatttgaagtgcgtgttggtaatcaacgtaataaatatgcttatactgcagaaacaagtgcattaattcatttaaataatgatttttatagattaacaccgtatttcacaaaagactttaataacatttcgttatactttacagctattacattaacggattcaatctcaatgaagttaaaaggtaaaaacaaaatcattttaactggtctggatcgtggttatgtatttgaagaaggtatggctagtgtcgtgctaaaagacgacatcattatgggaatgttaagccaaacgtcagaaaacgaagtggaaatcttacttagtaaagatattaagaagcgagacttcaaaaatattgttaagttaaacactgcacatatgacttactcgctaaaataaataataaagaggctggggcattaagttcttaggcaatgtaaaaaagctgatttctattaattatttgatagaaatcagcttttttgatatgcattttataatgtacagctcgttgagctgctattttccttatattaagtgccattaatacaaaacctatggcactagcttctacttttgtaccatcaataaaaattgaattatcatcaataagattttgctttaaacattggctatggaactgaataaataaagattcaattaacgcatcagtgttaggattcactctaaaacgattaatagttttataagaaggtgtttgattttgagctaaccacatcattcgaatactgtcatgaagtaatttttctattctacgaccagaaaatacagattgagtatatgcatataagataatttttaacatcatttttggatgataggatgttgcgccacgatgatgtctgaattcatcaaattcactatcaggtatcgtttcaacaatttcattaacatatcgcgaaatatcattttgaggaattctaacagaagtttctattggtagtgtaagttgggcaaagtgtcttatttttttttagtatttcaaagtaaaattacatgttaatacgtagtattaatggcgagactcctgagggagcagtgccagtcgaagacaggggccccaacacagaagctgacatatagtcagcttacaacaatgtgccggttggggtggctgagacggcaccctaggaagggacccgtcatcaaaaattctatttatagaattttacagtaatgtgccagacgggcaaagcgaagccattcaatacgaagtattgtataaatagagaacagcagtaagatattttctaattgaaaattatcttactgctgttttttagggatttatatcccagcctcgttttattttgctatttatgaaatgattatgacatttccctgattttcattttcaaatacattaaattgtatacactggaaatgaggaggtcgtctataatgataaataaaaatgatatagtagcagatgtagtaacagattatccgaaagcagcagatatttttagaagcgtaggtatagacttttgctgtggtggacaagtaagtatagaagaagcatccttagaaaagaaaaatgtagatttgaacgaattattacagcgtctcaacgacgttgaacaaacgaatacaccaggttcgcttaaccctaaatttttaaatgtttcgtcacttattcaatatattcaagcagcatatcatgaacctcttagagaagaatttaaaaatttaacaccttatgtgacgaaattatcgaaagtacatggacctaatcatccatatttagtcgagttaaaagaaacatatgatacatttaaaaatggcatgttagagcatatgcaaaaagaagatgatgttgattttccaaaactaattaaatatgaacaaggtgaagtagtagacgatattaatacagtgattgatgatttagtatctgatcacattgcaacgggacaattgttagtgaaaatgagcgatttagcatcaagctatgaaccaccgatagaggcatgtggtacttggcgactcgtttatcagagattaaaagcacttgaagtgttaacacatgagcatgttcatttagagaatcatgttttatttaaaaaagtatcataaataacgcgattagaaactgttggcaaagtaatgtcagcagtttttcgctatacttaacagaaatttagtgacatgatattcattattttgaaaaggaaaattgttaacttagcataagaattgatatgaaattttaatggtataggtaattaaatagtatcgtgtttttttaataatttattcatgaattttacatgcactattatgataaaataaacataattataattcactgaggtgctatcgtgctatcgctaacaatgttattacttgagcgtgtaggtttaattattattttggcctatgtgttgatgaatattccatattttaaaaacttaatgaatcgtcgacgtacatggaaagcacgttggcaattatgtattattttcagtttgtttgccttaatgtctaatttaactggtatcgtcatcgatcatcaacatagtttgtcaggaagtgtgtacttccgtttagatgatgatgtatctttagctaacacacgtgtattaacgataggtgtcgcaggattagttggtggcccttttgtaggtctatttgttggcgttatttcaggtattttcagagtgtatatgggtggggcggatgcacaagtttatcttatctcatctatatttatcggtataattgctggttattttggcttacaagctcaaagacgcaagcgttacccgagtattgcgaaaagtgccatgattggaattgttatggaaatgattcaaatgttgagcattttaacattttcccacgacaaagcatatgcggttgacctcatatcattaattgcattaccaatgattattgttaatagcgttggtacggcgatttttatgtctattatcatttcaacattaaagcaagaggagcaaatgaaggctgttcaaacacatgatgtactgcaattgatgaaccagacattgccgtattttaaagaaggattgaatagagaatcggcacagcaaattgcgatgattattaaaaatttaatgaaagtatctgccgtagcaattacaagcaaaaatgaaatcttatcgcatgtaggtgcaggtagtgatcatcacataccaacaaatgaaatattaacaagtctgtctaaagatgtattgaaatcagggaagttgaaagaagttcatactaaagaagagattggttgtagtcatccgaattgcccgcttagagcagctatcgtgataccacttgagatgcatggttctatcgtcggtacattgaagatgtattttacaaaccctaatgatttaacttttgtggaacgtcaacttgcagaaggattggcaaatatttttagtagccaaattgaacttggtgaagccgaaacgcaaagtaagttattgaaagatgctgagattaagtcattacaggcacaagtgagtccacattttttcttcaattcaattaacacgatttcagctttagttagaataaatagcgaaaaggcacgagagttactattagaattgagttattttttcagagcgaatttacaaggctcaaagcaacatacgattactttagataaagagttaagtcaagtgcgtgcatacttatcactcgaacaagcacgttacccaggaagatttaatatcaatattaatgttgaagacaaatatcgcgatgtgcttgtaccaccatttttaattcaaattttagttgaaaatgccatcaaacatgcgtttacgaatcgaaagcaaggtaacgatattgacgtgtcagtgattaaagaaactgcaacacatgtacgtattattgtacaagataatggtcagggtatttctaaagataaaatgcatttgttgggagaaacatctgtagaatcagaatctggaactggtagtgctttagaaaatttaaacttacgcctaaaaggattatttggaaaatccgcagcattacaatttgaatcgacatcgagcggtaccactttttggtgtgtacttccttatgaaagacaagaggaggaataaatatgaaagcattaatcatagatgatgagccattagcacgtaatgaattaacatatttattaaatgaaattggtggttttgaagaaattaatgaggcagaaaatgtaaaagaaacattggaagcactactgataaatcaatatgacattatatttttagatgtcaatttaatggatgaaaatgggatcgaattaggagctaaaattcaaaagatgaaagagccacctgcgattatttttgcaactgcacatgaccaatacgcagtacaggcatttgaattaaatgcgacagactatattttgaaaccgtttggtcaaaaacgtattgaacaagcagtcaataaagttcgtgcgactaaagccaaagatgataatagcgcaaatgcaattgcgaatgatatgtcggcgaattttgatcaaagtttacctgttgaaattgacgataaaattcacatgttaaagcaacaaaatattattgggattggcacacataatggtattacaaccatacatacaacgaatcataaatacgaaacaacagagccattgaatcgttatgaaaaacgattgaatcccacttattttatacgtattcatcgttcatatattattaacactaaacacattaaagaagtgcaacaatggtttaactacacttatatggtaatattgacaaatggtgtcaagatgcaagttggacgttcatttatgaaagattttaaagcgtcgataggattactttaacagtaatccttttttttatgcattttacctatgatattttgtatttcggactaaaattcacgcaaatcgaagtgagccatctatactttagttaaatcaaacgtaggaggcaatggtcgtgaaacaacaaaaagacgcatcaaaaccagcacacttttttcaccaagtcattgtaattgctttagtactctttgtatcgaaaataattgaatcatttatgccaattcctatgcctgcatcagtaatcggtttagtattattatttgtattattatgtactggtgctgttaagttaggcgaagtcgaaaaagtaggaacgacactaacaaataacattggcttactcttcgtaccagccggtatctcagttgttaactctttaggtgtcattagccaagcaccatttttaatcattggactaataatcgtctcaacaatactattacttatttgtactggctatgtcacacaaattattatgaaagttacttcgagatctaaaggtgacaaagtcacaaaaaagatcaaaatagaggaggcacaagctcatgattaaccacttagcactaaacacaccatacttcggaatactgttatccgttataccatttttcttagcgaccatattatttgaaaaaacaaatcgtttcttcttattcgcaccgctatttgtcagtatggtatttggtgtggccttcctctatttaacaggcattccgtataagacttacaaaataggtggagacattatttacttcttcttagaaccagcaacaatctgttttgcgattccgttatataaaaagcgtgaagtgcttgttaaacattggcatcgtatcatcggaggtattggtatcggtacagttgtagcgttattaattattttaacttttgcgaagttagcacaatttgccaatgatgttattttatcaatgttacctcaagcagcaactacagcgattgcgttaccagtatcagctggtatcggtggtataaaagaattaacatcattagcagttattttaaatggtgtcattatttatgccctaggtaataaattcttgaagcttttccgaattactaaccctattgcccgaggattagcacttggaacaagtggtcacacattaggtgtagcaccagccaaagaattaggacctgtagaagaatcaatggcaagtatagctttagtgttagttggtgtagttgttgtagcagttgtgcctgtctttgtagcaatattcttctaaaacgaaaaacctaagcaagataatagcaatttgagccattgttattatcgtaaaaaaacgtctatactccggtttataactggaatatagacgtttttatgtatgtattactttttactaggttttatggtatttaggcgttcgttttatgtattgcggcttttgaaaaatgatataatgaattaatttaactaagaattaaaatgtaagttatatcatttgtgaaatttcaattaaatatttttcgacaaattcttgaaattacttaatgtcatcaacactttataaaaaaacggcgtatgcttatatgtaagaatgcaattaagaggagattttataaatgagtatgcaaagttcatataaacgtttagttaaagtgctactaacgattttagtgattgtgttttcaattctactagtaggtggttggtatatttttaaaaatgaagcacctcgtccaacaaagatagtagatcaacaaggtcatacgcttgttacaaaaggcgagctaatcagtgggcaagcgatatatgagaaatatgggttaacagattatggctcctacctgggcaatggttcctacttaggcccagattatacagcagaggcattacatcattacctgattggtatgcgtaaatattatgcacaagatatttatcataagcaacttcataaattaaatcatgcagagttagccgtagttaaagataaagtgatgaaagaaatacggattaatcgttattctgaaaaagaaaatcaacttgtattaacgccaggacaagtatacggtctaaaatatttgcaagattattataaaaaagagtttgttaataaccctaaacaagtaggattaaatgaaaatatgattaaacagtttcaaaatgatgattatatggtcgcaggaaataaagttgaacatttaagtcaattctttttctggggtgcttggttatcatcaacagatagacttggaaaaacattttcatatacaaataattggccatacgatgtggatgcaggaaatacgttgcctagtgcaggaattttatggactgctatatctgtaacattactgattgcaggcttggcattcattatatatattcaaaagcgttatgaatttgacatgaagccgacgtatgagtcggaacgggaactaccaaagattgaagtagatagtaaaatcactgatagtcagcgaaaagttgggaaatatttagtcgttgtcatgttactatttttggttcaaatattattaggcgaattactggcacattattatgtagagaataaattttttggtatagaaatacaaaggctctttccatttaatattgcgaagacatggcatgtgcaattagttattttctgggttgctacgacttggttagcagcaggaatatacattgtacctaaagtattgggcaaagaaccaaagaaacaaggcgtattagtagatatcttgttttgggccttaatcatagttgtgatgggcagcatgattggagaatggggtcatattttaggttggattgattctcattggtggctattcgggcactttggttgggaatatatagaattaggtaaattttggcaaatattatttatagtaggtatggccttatgggttatcattctttgtcgagggtttttaccagctattcgcaacaaagtacaagcgaatcatgataaacgtcacttattgacgctattgtttgttggagcaattgcaattccgttattttatcttgcatcattatttataatgccgaattcacatgtgacgtttgcagattactggcgatggtggattgttcacttatgggttgaaggtatatttgaagcatttgccgtagtgttgatttgtttcttaatggttaatatgaaattaactgccattgaaacgacgattcgtgcattatattttcaattaatcctattactaggtacaggtattgttggtatgggtcatcattactattggcaaggtgatcattccatatggcttgcactgggttcttgtttttcagcattagaagtcgtgccactttgtttattaatttgggaagcatacacacactatcgcttatataagaaaagtgacatcgcttttccttacaaaggtacatttatttttcttgcttcaacaggattgtggaatgcaattggtgctggagcattaggctttttaattaacacaccagcagttaactactttgaacatggtacgcaatggactgcagcacatgcccatggttctatggctggcgtgtatggtatgttctcaatttcaattgcgttgtatgtttttaaaaatattactaaaaaagaattttggacaccgaaagttgaaaaatggattaaaatatcatgttgggctttaaatgttggcttggcaggtatggtgttcattacattaatgccagtaggttatatccaacttaaagatgcattagaacatggttattggcattcaagactaacgtcattttatgaacaaccacttgtaaaagcaatcatgtggggtagaatgccttgggacattatattcacagtaggtgtcattatattagtagttatttttataaggggatacagacacttaaaaccaaaatacagagtatagatcatcatattactgagtgatcttagtgtgttttaacgtttgagacgaagagatattatacaataggattcaaactataggttcttagattatgtaaatataaagaacagtaaaaagtaattttctgattgaaaatgtacttctcactgtttttaaagaaattatgtcctataaaacgtctatactccggttgataactggaatatagacgttttgatgtatgtattactttttactaggaatataaaactgtgcatgacgataatgaaatacgatgtcagacgaatcaaagggtttgccagtcattgtataaaaagtctggtggtaacgtaaacatggttcacctgtagacaattgtagtaatgaagcttcacttgaagtgagttgatctacattaaagaaaatatctgaaaaaccaatacgaagtttcatgtttgattctaaataatcgaagatagagcccttagcaatatcatcatttaaatatttcacgatttctttatgataataagaatattcgatacataaaacatcatcgtccacgaatcttaatcgctctaaatagtagacggtatcatctgcatttaattggagctcatcttgtacagatttaggtggcgttgcaatctccttaaaaacaagtaccttacttgtcattcgatgttcgcctaaacttttagaaaaaccattggtcttaaaaacattgatacgattggcatctgcaatatttctcacataaataccactgccttgtgcttgatagatcaaaccatcttgttccaataagcctaatgctttaatgatagtactcttacttacttgataacgttcttttaattgcgtcacgcttggcaatttatcaccgggtttgaaattagattgatgtataaacgcattaagttgcttagcaatatgttcatactttaacaatattctgtcctcgtttcactttgtctgtaattattatagcacaaaatattataattgtatcggcgtttacaaattgaaccggtacaattataattatgataagtcatatatttccattctattatcaagttgagggggtaatacttatgggcaataaatataaagattatgctcaagacatccttacagctgtagggggtgtcgaaaatattgttaatgtttcgtatgatacggtacgcatgaccattcatatgcatcatgcaattccttctactgctaatgaagtaacacaaatagatggcgtggcgtcagttgatgaaaatgaaacacagttagttatcgtatttaatgaagaagtaaaatatgtatatcaacaattacaattgttaatggacgacgccaagcatcaagaagatacgaatcatgatgctgtggatactcaagaaacagaacagaaagcgcaagtaaaagtaacaacaccaattttagtgaaagcaccaatcgctggtcgtcgtattttacttaaagaagtaagagattcaatttttagagagaaaatggtaggcgaaggcttggcaatcaaagctcatgaagaatccaaagtaaccgcaccgttcaatggcttagtatctatgattgtaccaactaagcatgcagttggtattcaatcagaagacggtgtggacatagtcattcatattggcgtgaatgcagttgacttagaaggtaaaggattcaagtgctttgtaaagcaaaatgatcgtgttgaagctgggcaaacgttgttgcaattcgaccagcaatatatacaacaacaaggctacaatgctgacgttattgtcgttattagcaactctgccgatttaggaaaagtagaactgacaatgaatgaaatcattacgactgaagatgttatttttaaaatatttaaaaactaggagtgtgttgtaataatgacaaatttaccgcaaaattttatgtggggtggcgctcttgccgcaaatcaatttgaaggtggatatgataaaggtggtaaagggttaagtgtaattgatgttatgacgagtggtgcacatggcaaagcacgtcagattacagaatctatagatccaaatcactattatccaaatcatgaaggtattgatttttatcatcgctataaggaagatattgccttgtttaaagaaatgggattgaaatgtttacgtacgtcgattgcgtggacacgtatctttccgaatggggatgaagatgtgccaaatgaagaaggacttgccttttatgatcgtatctttgatgaattaattgcacaaggtattgaacctgttgtgacgttatcacattttgagatgccacttcatttagcaaaacattatggtggatttagaaatagagaagttgtcgattattttgtgcattttgcgcgtgttgtatttgaaagatataaagataaagtgacatattggatgacgtttaatgaaattaataatcagatggacacatcaaatcctatctttttatggacgaattctggggtagcattaacagaaaatgataatcccgaagaagtcttgtatcaagtagcacatcatgaacttttagccagtgctttagcggttcgtcttggtaaagagattaatccgaaatttaagattggaacaatgatttcacatgtacccatttatccatattcgtgtcatccgaaagatatgatggaagcacaaattgcgaatcgcttacgtttctttttcccggatgttcaagtaagaggttattatccaagctatgctaaaaaaatgttggcacgaaaaggatatgatgttggatggcaagaaggggacgacagtattttacagcagggcacggttgattatattggctttagttattacatgtctacggctgtaaaacatgatgttgatactacagttgaaaacaacatcgtcaacggtggtttgaatcattctgtggagaatccgcatatcgcaacgagtgattggggttgggcgattgatccagatggcttaagatatacattgaatgtgttatatgatcgttatcagttgccactttttattgtggaaaatggttttggtgcagttgatgaagtggtagatggacatattcatgatgattatcgcattgaatatttaaaagcacatattacagcagcgatagaagcagttgatcaagatggtgtagatttaatcggttatacaccgtggggaatcattgatattgtttcatttacaactggtgaaatgaagaaacgctatggtttaatatatgttgatcgagataatgatggtcatggcacgatggaacgcttgaaaaaagattcgttctattggtatcaacaagtgatagcatcaaatggagataaattataaagatacgttataagtattttagggttagagcccgagacataaattaatataataggacctaaagtgttatattggcgggccccaacacagaagctggcgaaaatacagcttacaataatgtgcgagttggcaggcccccaacacagagaaattggaacagcaatttctacagacaatgcaagttggcgggcccccaacatagaagctggcgaaaagtcagcttacaaaaatgtgcaagttggaaggcctccaacacagagaacttcgaaaagaaattctacaggcaatgaaagttggggaaggacagaaataaattttgcgaaaataacatttttgtcctaatcccgtgatgttaaaattttaagaaaaaaataatgccactaactaagtatgtatagtgttaatgtttgagtgtttataaaagtctttaaccaaaattgatgacctactaatcaacgataacgatattgttaagtagatgattagtgtcacaaagaaattaaagtagcagtcaaacatagatacaaagtacagttagtggcattatatttagtggtcttttttagcgacaaaagtaatataattcatatctttacgcagtctagtcatcgttttaaacattttacaaaacattggtcgattttctttttttaaagcattgttgataatctttaaagttccaacaataccttcgtcataaattaaaccttttggtgtcattaaactcattggaccagtatgataatgtacatgattaaaaccagcttgataatataaatctaaccagccaagtttcgtctgcggtgagacattgacattaattgctgcagataatgatttaactacatgtgtggcatgtgattcattaacgatgacaatatcatgtgttaacaagatacccccaggctttaagactcggtagtactcgcgtaatgctttttcctttatggcgatgggtaacattgcttcatttaaaacgatatcgaattgattgtcatcaaagggcaatttaacagcattcgcttgttgaacttgaatatatgattcaagacctgctgctgagatattttcttgtgctttttctaatgctttcttatttatatcaacgccttgaatgtgacagccatatgtatgagctagataaatagatgtcgtacacatattacatgccacttctaacacttgtttatcttgtgaaaatgccccttgttgtattaaccaatctgttgctgctttaccaccggggcgtagacgagtttttcctaatttagctaaaaatgtatggccagcttctttggacatagcataacctcctgttaattgataattattatcattaatatagcatatttatatgcgataatttggaagttaaaaagattacaaaaaattgtcacttcatttataactaaacatgagtcatcaagcataggtttagtggaaaattatttctaatagatgatgttttataaagataaaaaagcacagccatgatatacgaatgttgcatgttatatgctaaaccttcatatcatagctgtgtttgattcatttaaacttgatttacttcttctagtagaggaatagatgcttgcgcgccgtgtttttgtacagtgagggagctcgctttattaccaaaatcaatagcatctgctaagttatcttgcgacttgtttaagcgactgacaaatgcaccaataaatgtgtcgcctgcagcagttgtatcaatcgcatttactttataagcttcgatgtgttggctttgatttttagtagcaaaatatgtaccttgcttacctaacgtaatcaaaacagtcttaatgcctaaagataaaaagtaattagcattgtctttcatagattgttcattagttactttaatcccagataacaattcggcttctgtttcgtttggcacaataatatcgattagtgacaataattcattaggtaatgctttcgctggtgcaggatttaatacagtcgtcacaccatgtgccttggcaatttcaaatgcagatataatagccgggatgggtacttctaattgtgcaacgacaaagtctgcattgattatagcgtcttttgcgttaataacatcttcaggtgtcatcgtcatattcgcaccaccataaacatagatggtgttttgtccttctgcattcacagtgataaaggcttggcccgtttttgcttcagttgttttgataatatatgatgtatcaatatgagccgctttaaaatcttctaagatgaaatcagcaacgccatcagtgccaattttagtaataaatgttgtgtctgcttgcatgcgtgcagtggcaatagcctggttggcacctttacctccgccgaatgctttttgtgcttcttcaacatgtaatgtttcgcctggttgcgcatatctttcaactgttaaaaattgatcgacattcgttgaacctaaaataacaactttgttggtcatgtgtatgctcctttcaagttataatttttaaaaagtaacattcgattctaatgcaatattagagtagggcgttgtttcaccagtacgaatattacctttatttaatgggtgagctaagttacttttcatttcttcgtgaggaatgaaaatgatttcgatttccgatgaaatcaattgtttaatttgttgcaattgtgtagggttatgttcttttatttcttctgctaagtatattttttggatttccatttcttctaatactgtagctaagacatcaataaagcgtggtaagtttttagtgacagctaggtcgatacggcgatgatcatttggaattggcatgccagcgtcattaattgttaataggtcaaaatgaccaattgtcgcgattgcttttgaaatatgttcatttaaaatagctgattttttcatgacatctacactccttattttataaatactgtaacagaagcggctactaaaatgagtactaagccgatgattgtaataaccatttcttttgatgttttatgttgttttaagaaataaataccagttaatgtagcaagcacaacggatgtttgagaaagaataaatccagttgctaaaccattcatattaggttgtgctgaaataagatatgttaaggcaccaaatgcaaagaagaaacctgaaataatttgtaaccacgtaattttattacgaaatggattctctgcttttatattcataaagccataaatgactgcaacaattaccatacccattgcttgaggtaaaaaggcagttaggccatcaatagaagttgcttgtggtgcggctgaatataaccagtatccaaattcaccaattaacagaagaatcactgcacgacgtaaatttttggcgttacttgcttctttgcgttcactccaaactgtcatacgcgcaccaattaaaataacgattaatgctgtaaaaccaatgattttatgaccaatgcccggccaatttcctaatgcaaagacaccccataaagatgcgcctaataattggaatgctgttgtgacaggcattgcacgagatgaaccgactaattcgaacgctttaaatgtaatgatttgtccgaatccccatcctgcacctgataataaggcgaatagtaaatttgttccagtaggtaagccacttgatgtgattacggctaaaataatagcgaagattaacgtacctacagtagcaccgataatttgatgtacaggtttaccaccaaactttgaagcgactgttgggaagaagccccagccaattaaggggcctaacccgataagtaatgcaacaatgctcatgttatacacctcacgatttgtttttagtaaaacgttttaccagtgccatcgtaccatttttatttgtaaaatgcatgcgttttcataaaaactgaaaacgtttaaatcatatttaaaaattcatacattattattttaatttcttagtgaaataattatgattaaaaaccctcagcattaaagcaacgctaagggcataacaatgatgagtatatttcggaagatacgtagttagtttgaaagatgatagccagttgttgcacgaatttttaaagtcgttggtaattcaatcatatcaatggatttatctaagtgctgtaatcgttgaagtaataaggttaaagatgttttgccaatatcagttataggttgtgctacagtagttaaaggtggcgtgacatacgcggcataatcaatgtcgtcataacctattaatgagatatctttcgggatactgatgccatgttcaattaatcctcttaaaataccgatagcgagttcatcgttaatagcgaagattgcagtggcagattgaaccatgatgtcatcaacaatggttagcccaccgcgcttagataattcagtatggacgatttgtggttcgggcaattgattcgtgcgcaaagtatcaacaaatccagcgacacgagtcgacatattcgccatcatgtcatatggtgcaacaatcatcatattgttgtgaccgagttctattaaatgttgtgctgcaagttgtccgccttgatattcatttgtccgaacaaaatccgtatagccttgatggtcattttgatccagtacgacataaggtacatgatgcttctttagatagttatttagggcgtccggggatgaaatgtattgtgcaataattaatccgtcaatacctcgatcaattaaatgtttaatattgtcatacaaatcagttgctgtagatgttaaaaagcataaatcaacatcagatggtttgtgatcatgaatactttgcatcagtgctgagaaaaacggatttgttaagctaggtaaaatgacgccaatagtttgaattttactgccgcgcaattgttttgcatgtttgttaggggcatagcctaaacgttctgaaacagcatgtacgttttttatcgttgttgaggaaaaacgactatcattatgatttaaaatatgtgacaccgtagtaactgatacaccagcttctctagcaacatctttaattgacacttttttcatattatattccttctctttattgtgtaattaatcatacagttatatacccgattattatattcatcatatcatgataagcatttaatgacatatgaagaggtgcatgacttttattgtctacaaacagacgcctatagtatgcgattaaggttgaggcgagagaatatattattaaggttaaataacttttaatgattatgataacaagaattttaaaatgtttattgtgatgaaaaatacaaaagtcattattttaaagaataaaatatttgtttttgaaaaaagtattaaaaaacataacgaaatgatgtatattgaactatgtgattgaaaaaatttttaattaaggcttgttaaaaattaagagaggatgtttttaaatgcaattcaaattaaaagaagaagagattattagttttttagaattgaaatatccagaaaaagagttcgaatatggtcgtttgttagttggacaacataagcgagatgatttagatgtttattactttggtgatacgtttttaatgtgcacgattatttcattcaagacatttgaaattaaagaaacagtagaattatcatatgatgctgttaatcgtattgtgttaaaagatggatggttatttagaaaaatgagaatagaaacaatgcaaaaagtgttaaaatacggtacatctaaattaatgttaactgattttcaaaaggataattataataaatatattcaaggtcagaaacaacgcgtgatatttgaaaatggccattttgtctaattgatagtgaataataattagagtaagcgaagaacaataaaaaatgttcttcgcttatttttatagaaattgatgcgtatcattttaaagtgatacagatatttcgaaacataattcttctattatatttaagatttaactgtttttggaatgatcatgtatgcagataatgagccgagtatcattaatacaatgctgacgataaatgttacagttgcagctacacttggtgcatagtttagttgtaacatactgaaaactgtagtacttagtgctataccaaaggcgccacctagtgtgccactcattttatataatcctgtagctaaaccaactttttcattaggcatactgaaaattgcaattgtaaggccgggtgttgccactaaaccatttccaattgcgcaaatgacaaacccagtaacaacagcaatgatatattgtgatggttgaagtgatgtcatgctaataatagtgatgccgatgacagggaacaacggaccaatgatgagcatcaatttgccaccgaaacgtaatgttgctttttcacctaaacgaatcatcgcaactgccacaatggcatatggcaatgtaacaagtccagattgcgcagctgataaaccaaggtgtgtttgagcatatatgaaaaagaccactgttacgcccagaccactatttaaaacaaagttatttaaaaatgcaccaatgaacggacggttgcgtaatactgagaaatcaataaaaggtacttcatgtcgacgttcgatgatgatgaatatcaacgtagtgatgataaaaatgctcagacaaatgaatgaaaatgtactaaaccaaccttgttcgaatccttgtgttaacaataatgtaaagctaccaatcataacagcgaaaatagacatacctttgtaatcgaatggatgacgatggctatgttgacttactttttcaggtgtgccttttagaagcaatatggcaatgaaagcaatgactatactaatgatgaaattcgtttgccatccaaaatttgtggcgattaaaccgccgataacaccagctaggccgatgccaccaacagtactaatcattagataactaatcgctcgtcttaaatgatctcctttaaattgattatttaaaacgccaactgttgaaggtaacaagatagctgctgatagaccttgtaaaattctaccgatgatgagcagtgcagtgatgtccgatataattaatagaagagatgcaaacatactgattatgagacccatgtatgtcattctcagttgtcctattttatcagcaatatcacctgcagccaccatgaagatacctgtggcgaaggaagttaaactaatagataaatttaacacggcaggagaggtttgatacgtttgaccaacgagaggtcctatattaataaatgattgtgcaaacaaccaatatgttaatgcagacaacataatcgcaataataatattactgcatggtgaagattgtgtgttattcacagatgtcactccttgtaaaaattaaatatagaaagtcatgagatgaagtgaacggatgtatagatgatcgttcactcacacataagtcatgatttccttacatatcataccacagttattgagaatgaatatcaattaattgcttgtatgattgattttttatagtatgtttaagtgaaacagctttatttgaaagtgattaaagtaaatgaaggtacagaggagtgagaacaatgtgcacaggattcacaatacaaactttaaataatcaagtacttcttggacgcacgatggattatgattatccattagatggttcgccagcagtgacgcctagaaattatcgttggacatctcgcactggcacgacaggccaaacgcaatatggctttattggtacaggaacagatatggaaggttttatttatggtgatggtgttaatgaacatggcgttgccatttcaacacaatatttccgaggttatagttcatatggatcaacacacaaagcggacgcgatgaatattacgcaaaatgaaattgtgacatggattttgggatatacaacaagcattgaagatatgaaacaacaagcatcccaaatacatgttgtagctgtatatttaaatgatatcggtgaagttccgccattgcattatcatgtttccgatgcaactggacattcagtcgaagtttcatttaaagagggtgaagtggttataaaagataaccctattggtgtcttaacaaatcatccagacttaaattggcattatagtaatttaagacaatatatcaatatttctccttatccaacaacagcaaatttattggaaggtgtaacgattgaacctttaggcaatgaagcaggtacatttggattgccaggtggatttacttcaactgagcgctttgtgagaatggcatttatgaaagcaaacattgctcaaaacaatgataaagaaatggatttaatgaatgcattttatttattagatgcggtaaatataccgattggaattgtacgtccgcatgatgctgacaatcactatacgatgtatcagaccgtaataaatttaactacaagaacgttatatattaagtattatggcagcaatgaaatagtagcattaaagctcacagatgatttaattaatagaaaagatatgacgatttttaagcctgagaagcatatcactattagaaagttgaatgacaatcaatagcgattgataatggaatttggttgatatgatttgatggatgattactatcatacattagcgttgaaccgcgaacatggacgaatgattagttgttaattttgaaaatttataaaaggttaaacgaatgcagtgagagatgtcattttaatatcaatgtatggctattttgtaatgacaatgtaatgagtttagtaaaacatttcgggaatattaaatagttggaaaatgagaattaaatcctttactcagttgtctaattcttttagtatgtgcagtacagtttaattgagaactaactttaactttaatggaggatgttttatacatgaaaaaattaacagcagcagcgattgcaacgatgggcttcgctacatttacaatggcgcatcaagcagatgcagcagaaacgacaaacacccaacaagcacatacacaaatgtcaacacaatcacaagacgtatcttatggtacttattatacaattgattctaatggggattatcatcacacacctgatggtaactggaatcaagcaatgtttgataataaagaatatagctatacattcgtagatgcacaaggacatacgcattatttttataactgttatccaaaaaatgcaaatgccaatggaagcggtcaaacatatgtgaatccagcaacagcaggagataacaatgactacacagcgagtcaaagccaacaacacattaatcaatatggttatcaatcaaatgtaggcccagacgcgagctattattcacatagtaacaacaaccaagcgtataacagtcataatggtaatggaaaggttaattaccctaatggcacatctaatcaaaatggcggttcagcaagtaaagcgacagctagtggtcatgcgaaagacgcaagctggttaacaagtcgtaaacaactacaaccatatggacaatatcacggtggtggtgcgcattacggtgtcgactatgcaatgcctgaaaattcaccagtttactcattaactgatggtacagtagtacaagcaggttggagtaactatggtggtggtaatcaagtaacgattaaagaagcgaacagtaataactaccaatggtatatgcataataatcgtttaactgtttcagctggtgataaagtcaaagctggtgaccaaattgcatattcaggtagtacgggtaattcaacagcacctcacgtacacttccaacgtatgtctggtggtatcggtaatcaatatgcagtagacccaacgtcatacttacaaagtagataatacagtaaatcccaagttacgatatcatacgcaacttgggatttttttcgttttaataataggtataagcccattgcttgtcctctaaaacatgttgataaaaaggatcttggccaattaacttgatatcatctgcaagtgcttcaacttcatctaaatgatgggtagttaatataattaaacatttagatttcataatgttaagtagttggtggatgtcatgtctagattttaaatcaataccaactgtcggttcatctaaaatgagaattcgaggttgacctagtaaacctactaatatattaattttacgtttattcccaccagacaatgtagatactttggcagacgtatcatcaaagtttaattgctgtaaatattcgttgatagttgtatcgttaattggatttttacaaagtgatttaaaaaatttaatgttttcagccactgtcatgtgttcaaataacgcaatgtcttgtggcacataaccgatgtgattttgtatttgtctttgattccatttttcgccgaaatagttgatagttccatcattagctttttcaataccagcaatcatacgaagtaatgttgattttccagcgccattatcaccaagtaatacggttaaacgattactatcaaaggacatggttaaatgattgaaaatctgtttgttacggtaacgctttgaaaggttattaatttctatcatcagttacgctcctttacatgaaaatggtcaagtatacgatacccatagcaagtgcatatataaatgtcatgaataatcgatgacttattgtttgaatatggaataagataaagacgatacctatctcataaatcaatataagtaacagtgattttaagtaaaatattaagctgagtggttgagacaaatatagactaactgccaatagtaccaacaataacaagatcgtatgtgtcattacataagtactatatagtttgaaacggcttaaatgatattgtgataatcgttgcaatgctgcttgttggtttaaacgataatgaagtactacttgaacagcgctaacaaataaaatcaccgcaaagattaagctaattgaaatagagtgttgtgcttgtttagtaagcgacacaaatttgattttagattcaggtgtatgtttatgataggacttgttgatagcatcgatggattgatgctgtttcatatcctcaaggtgttcataaataatgttaggaatttgctgttcatataatgaactactaacaatttctacagcaataccacctataaagtcatctctaccatataactgtatcgtttcttttaaacggttctcttttaatttttgagagaaacctttaggaatttgcatacttaaaatagcttcctttttagtaacatcatcttcaatatagctttcatcttcatcgacttttttaatagttacatagtcagattgtttaattttattgacgaatgattttgatgcagtggtttggtctaaatcttgaatggtaatcggtattttgaagttgtcatgtgctacacggtaacccataccaataagtacgagtgcgatgacaatggttgttacgagcaagatgtattgtaaccattgcttgaacacaacaagttgtatataaggcttcattgacgatacctccaaaccaatacagctaaattaattatcaaaagtgcgatgaagctaagatagaaactagggtgcagttctaaaatgtagttgtttaaaataatttctaacaattgatttgttacaactgcgaacggttgaatattgaaaacgccatttgctatatgttgtaaaaaaatcgtaggtattgttaaaccagataacactaggatgacaatagctaatatgactttactaatactattcaacaagcctgttgttaaaagttcgatgagtaataaccacagtattaaaaaggtaacataatagcttaaatgaatggctaacgttggccaattatataattcaaaggtattcggaatactgaacataatccaaactacaccaacgatactccataacatagtataaaaccatgtaatcaacgcacgaatgattaacaaacgctctttagaaaaatgaaacattttcaatcgcgctttcaatacagtatcttgattcattttcaaaactgtaaataaagatagtgcaaagatgaataccgttgttaaaaatcctgtaattgcataataactgcccgtatcgtataaatgaatcggttctaagttaaatgcacctgaacggtttaatcctgtaatcagcaaatcagtcataacattgatactgtcagaatgtgatgctttcggtgctaagtcttgaaaagctaagatgccacccattgatcgcataagacgttggtaaacagaatctgttagctgagatagcacgacacttttcatggattgttgatcatatgtatatactgaaattggtagttcgccttgtttataaaatgccttggtcatacctttatcaaaaacaaagtagccttgaagtttctgctgttttagcaaagtatgtgcttgcttatcatcatatgctttaatgctcacattttttcctaggttactccctttaccaatagagtttaagattaatttcgtttcacttgattgatctttatctacgacacctatattaaaatgattgtcatcttctgttgcatgttggatcgtcgttaatgtaataaggagtgccactaatataaatagtaaatagataatcaaataccactttttcaataaaaaagagtggtagatgcgaaacaaatgtattgttttcatttaaccactcctccaatgataagattgaaaggcaagatgaccttccaatcttatttttatattttagttatttagatgccttttttaaaattgactcaaacattttgccgccatttttttcgatttctttttcaagtttttcacggttttttgaagatagactattgaaatctttcgcgccactatcatcaaaatcaatatctgctttcaattttgtgctagattttaaaatgaaattaattggttcttcagcatatttgatgccgatatttaacgtagatttctgagtgttattttttacgtcagaatctatattattttcaaaagtgaattcattttcgtcgctatatttatctaatgcgacagtgattttacctttatcttgacgttttgtgccatctactttttcttggttatctaatttgatttttgattcatcatattctgtctttttaccaaattcgtatttatcactgtatttattgtctttttccttagaagatacgcctttaattgtatatttcgcttcagcatacgtgtatttatcttgatcgaaatcaagtgcgtaatctagttttaacttatcgtcttctaaagtattagtacctttgattttagttttattattttctttgtctgtaatagtaatttctcgttttacaatcgtatgtttttcggtataaattttagattgaattttagcaaattcatcctttttagtttctttgacatcgtcaattgcttttttgatgtctttttcaaagtcttttgtagcaccttgttcttccattaattttttaaggtctttatcctttttagcttcttctaatacagctaatgtaatttttttagtgtcagctctgctaagtgttaacgtgacaggtctaactttgtacttttcaccattaaccttaatttcttcttttttacctttatcaaaattatcgtcatctaatttgtcgacaataagttcggaatatttttcggcaattttgctgtagtcactttgttgtgcttgagcattactaaaaagagtatttaaatttagttgttggtttgtaataccattttcttttgctgtttcttcatcttcacctgtaagttttgaataagttgataataaatcagaattattaacactatatttccctttaaataatggtgattcgaaataatgcttatctttatctgcagctaactggaatttccctaatgcagagtctgcgattgttggttcaagattaatcattgatttctcttttttaggatcatgtccatatgacattttaattttcgaagcattaacaacagatttaggaataccaagccccttaacaatttcatctgatgcatctgcgcttaattctaatgaagataaaaacgaattatctttcatcttttcttggaacttcacttcattttcaaaacggtcattaaaataatctttatacatttttgcagtatgttgttcgctttttaagtatgtatttttcggtgtgtttgcaaaaaatgcataaactccccatgcgattccacctattaataataagacaataataataggaattataatttttaactttttagacattttgcttcctcccaattatttatgagttaatcatatcagaacaatacattttattaaatggtttattttaaattttatttaaattaatagaattttagttataataatgtttaataagttattgaaaatctaataaactacaaaaaatagtttgattacataatgattcttgaaaaatgtcggttaactttataagaagcattttttggcgaagaagatttatttaacttattgaaaatattgaagctatattggggggattatgtatttatggaattgaaagtcgatgattttgtaaggaatataaaaagaccatacttgactgtattgggagtatttgtagttgcagtttcattattttttgacgcgattatgtttttctacgctaaactatatgataaattgcctatgtatttactggtgtttatggcctttacagctgtaattttgattatgatgtacatacaagagaaaaatgaaaattacaaagttgaaaaaagatatgtggttagatatctcacacttaacgttattgtgggatatactttgccattgctttttgtatctatttacgtttttggtgtagtcggttttggatttgatgttttcaattattgtctaggtattatcttgatgttatttatttcttggttaggtttatttttattttataaaaacgaatttgatagtgaaaatcctaatcctgcagttaatgccatagcaattattataaaattatttgcttttggaggaatattttatataagtctaatagttcctgtaacacagcaagaagagatttttatagggttaagtatattcatcaatataattgttgatgctctacttgttaggtcatattttaattacgcgttatacaagagtattaagaaagatatcgaaaatgaaggtaagacaatgtaaaggaaagacttaaaaaataataggagtctaaccatgataatttttattttaataacaatatttgctatttattatatagctatgattgctagtttgtttaaaagtgaaggtttttcaataataggtttaatattagatgttgttataatggggacgttgattttttactattttataggcgctcgctttgttgataatgatttaagcaactttttaatgtttatggatactggatcatatatttttatgtactttgcaattaagtgtttatgggtgaaaccaaaggtagtaaattatttgattgcaaaagaattgggtgaatctaaagaggtcattgaagagcaggaattagatttacagacatcaaagataagaggtatctactttttcattatttcagtagtgatgttaattatcactaaattaagaatgcaacctgagttacaggcagatgctatatcgatgaatcctgtatttatttttgttggtgttataatcattttaatttggctagtactggatatatatcgcaagaaaaaatacggcatattcttattcaagacgatagtgccattagttgttacgatttggattattatagctacaattatactttcgtaaatgatttttattaatggggaatgtagagaacgtttctttgtaattttataatcgaataacatacaaaataaagcgaccaattttgcagtgttacgaattgtaaactgcgaactggtcgctttttattgatgtcatgattaatttaatggatgtaattatatgatgaaacttctgaagcagagatggttcttgatgaaacgatatattcaccaatccagttcatttctgaaattagaatacttccatcaatattaactttctcaacgtaggctacatgaccaaatggaccgtttactgtttgtaaaattgatcctcgtgttgggtgtctatctactttgaagccattgcttgaagcttggcctgcccagtttttagcatctccccaaaatgtactaatcgtgtgtccatctttggcacgtttatcaaagacataccatgtacattgtccagcagtatataagttgttcttacttgtgataagaggctgatcaatgattttaccgttacctaatgctaaaggtttaccgtcagcagtctttgctttgtcattaaattcggcgatttgtaattcgtcatacaattcgtctaaatcgatgcctgtaataagccctttgttatcttttgaaaaagcgttatttaattcatcgtcattgtcttcgacattcggtattgctggtgtcaaaggattgcttggtgacgtttgaggcggtgtgtgtgaatcaattgcgtcattaatgtgcgtatactgaccacttaatgaagaatggtactgattgttgttaagatcacgttgatttgcgtgttgatcattgtcgtttgtacgtgactgattttgatgattgttgtttggcgcgttgtttttgtcataagtataagtatacgcgccggtgtctttattcactttgaactgtgcgtttgggtgtgctttctttgcttcttctaatgttttgctatcattcgtgtatgcttgagccgagttaggcgacatactaaataaagtaagagttgtcatcgtcagtaaaattgttttcttcataataaccatttaatcctttatgtatttaatttaattttagtatacacatttatattacaaaaatgaatggttaattaaaaatatatgggtatattcaatatatttatttaaaaaaagctaaaaatacttaaaaaactatatacatatactaataatttatatattatttgagtaaggagcactttttcaaaaaatagtgtccctaaaaagttttgataaacttaaaatattcaggaggtttctagttatggcaatgattaagatgagtccagaggaaatcagagcaaaatcgcaatcttacgggcaaggttcagaccaaatccgtcaaattttatctgatttaacacgtgcacaaggtgaaattgcagcgaactgggaaggtcaagctttcagccgtttcgaagagcaattccaacaacttagtcctaaagtagaaaaatttgcacaattattagaagaaattaaacaacaattgaatagcactgctgatgccgttcaagagcaagaccaacaactttctaataatttcggtttgcaataagcattctgaaattggtaaagtcacattttctaatgtggctttgcttatcattttttaagaaaacaactgaaaggaaataagcatgaaaaagaaaaattggatttatgcattaattgtcactttaattattataattgccatagttagtatgatattttttgttcaaacaaaatatggagatcaatcagaaaaaggatcccaaagtgtaagtaataaaaataataaaatacatatcgcaattgttaacgaggatcaaccaacgacatataacggtaaaaaggttgagctgggtcaagcatttattaaaaggttagcaaatgagaaaaactataaatttgaaacagtaacaagaaacgttgctgagtctggtttgaaaaatggcggataccaagtcatgattgttatcccagaaaacttttcaaaattggcaatgcaattagacgctaaaacaccatcgaaaatatcactacagtataaaacagctgtaggacaaaaagaagaagtagctaaaaacacagaaaaagttgtaagtaatgtacttaacgactttaacaaaaacttagtcgaaatttatttaacaagcatcattgataatttacataatgcacaaaaaaatgttggcgctattatgacgcgtgaacatggtgtgaatagtaaattctcgaattacttattaaatccaattaacgacttcccggaattatttacagatacgcttgtaaattcaatttctgcaaacaaagatattacaaaatggttccaaacatacaataaatcattattgagtgcgaattcagatacgttcagagtgaacacagattataatgtttcgactttaattgaaaaacaaaattcattatttgacgagcacaatacagcgatggataaaatgttacaagattataaatcgcaaaaagatagcgtggaacttgataactatatcaatgcattaaaacagatggacagccaaattgatcaacaatcaagtatgcaagatacaggtaaagaagaatataaacaaactgttaaagaaaacttagataaattaagagaaatcattcaatcacaagagtcaccattttcaaaaggtatgattgaagactatcgtaagcaattaacagaatcactacaagatgagcttgcaaataacaaagacttacaagatgcgctaaatagcattaagatgaacaatgctcaattcgctgaaaacttagagaaacaacttcatgatgatattgtcaaagaacctgatacagatacaacatttatctataacatgtctaaacaagactttgtagctgcaggcttaaatgagaatgaagctaataaatacgaagcaattgtcaaagaagcaaaacgttataaaaacgaatataatttgaaaaaaccgttagcagaacacattaatttaacagattacgataaccaagttgcgcaagacacaagtagtttgattaatgatggtgtcaaagtgcaacgtactgaaacgattaaaagtaatgatattaatcaattaactgttgcaacagatcctcattttaattttgaaggtgacattaaaattaatggaaaaaaatatgacattaaggatcaaagtgttcaactcgatacatctaacaaggaatataaagttgaagtcaatggcgttgctaaattgaaaaaggatgctgagaaagatttcttaaaagataaaacaatgcatttacaattgttatttggacaagcaaatcgtcaagatgaaccaaatgataagaaagcaacgagtgttgtggacgtaacattgaatcataaccttgatggtcgcttatcgaaagatgcattaagccagcaattgagtgcattatctaggtttgatgcacattataaaatgtgcacagatacaaaaggcagagaagataaaccattcgacaacaaacgtttaattgatatgatggttgaccaagttatcaatgacatggaaagtttcaaagacgataaagtagctgtgttacatcaaattgattcaatggaagaaaactcagacaaactgattgatgacattttaaataacaaaaagaatacaaccaaaaataaagaagatatttctaagctgattgatcagttagaaaacgttaaaaagacatttgctgaagagccacaagaaccaaaaattgataaaggcaaaaatgatgaatttaatacgatgtcttcaaatttagataaagaaattagtagaatttctgaaaagagtacgcaattgctatcagatacacaagaatcaaaatcaattgcagattctgttagtggccaattaaatcaagtcgacaataatgttaataagctacatgcgacaggtcgagcattaggcgtaagagcgaatgacttgaaccgtcaaatggctaaaaacgataaagataatgagttgttcgctaaagaatttaaaaaagtattacaaaattctaaagatggcgacagacaaaaccaagcattaaaagcatttatgagtaatccggttcaaaagaaaaacttagaaaatgttttagctaataatggtaatacagacgtgatttcaccgacattattcgtattattgatgtatttactatcaatgattacagcatatattttctatagttatgaacgtgccaaaggtcaaatgaatttcattaaagatgattatagtagtaaaaaccatctttggaataatgtcattacgtcaggtgttattggtacaactggtttggtagaaggattaattgttggtttaattgcaatgaataagttccatgtattagctggctatagagcgaaattcatcttaatggtgattttaactatgatggtctttgtacttattaatacgtatttactaagacaggtaaaatctatcggtatgttcttaatgattgctgcattgggtctatactttgtagctatgaataatttgaaagcggctggacaaggtgtgactaataaaatttcaccattgtcttatatcgataacatgttcttcaattatttaaatgcagagcatcctataggcttggcgctagtaatattaacagtacttgtgattattggctttgtactgaacatgtttataaaacactttaagaaagagagattaatctaatgttgatgaatagcgtgattgctttaacttttttaacagcatctagcaataatggcggacttaatattgacgtgcaacaagaagaggaaaagcgaatcaataatgatttaaatcaatatgatacaacgctatttaataaagacagcaaagcggttaatgatgcgattgctaagcagaaaaaagaacgacaacaacaaataaaaaatgatatgtttcaaaatcaagcgagtcactcgactcgcttgaatgaaactaaaaaagtgttattttccaaatctaacttagaaaagacttcggagagtgataaaagcccctatattcaaaacaagcaggagaaaaaaatattcccgtacattttgatgtctgtaggggcttttttgactttaggatttgtcattttttcaattcataaagggagacgaacgaaaaatgaatcagcacgtaaaagtaacatttgattttactaattataattacggcacatatgacttagcagtaccagcatatttaccgataaaaaacttaatagctttagtattggatagtttggacatttcaatatttgatgtcaatacacaaattaaagtgatgacgaaaggtcaattacttgttgaaaatgatcgactcattgattatcaaatcgctgatggagatattttgaagttactataggaggaaaaatagatggttaaaaatcataaccctaaaaatgaaatgcaagatatgttaacgcctttagatgctgaagaagcagctaaaacaaaattacgcttagatatgagagagattcctaagtcttcaattaaaccagaacattttcatttaatgtacttattagaacaacattctccatattttatagatgctgaattaactgaactacgtgacagtttccaaatacattatgacattaatgacaatcatacaccttttgataatattaaatcatttactaaaaatgaaaaattacgttacttactcaatatcaaaaatttagaagaagtaaatcgtacacgctacacatttgtgttggcaccagatgaattatttttcacaagagatggattaccaattgctaaaacaagagggttacaaaatgttgttgatccattacctgtgtcagaagctgaatttttaacaagatataaagcactggttatctgtgcattcaatgagaaacaatcatttgatgctttagttgaaggaaacttagaactacataaaggaacgccatttgaaactaaagttattgaagcggcaacgttagatttactaacggcatttttagatgaacagtatcagaaacaagaacaagattatagtcaaaattatgcatatgtacgcaaagtaggacataccgttttcaaatgggttgctatcggtatgacaacgttaagtgttttattaattgcattcttagcctttttatatttttcagtaatgaagcataatgagcgcattgaaaaaggataccaagcatttgtaaaggatgattatacgcaagtactaaatacgtatgatgatttagatggtaaaaaattagataaagaagcactttacatttatgccaaaagttatatccaaacaaataaacaaggtttagaaaaagataagaaagaaaatttacttaataacgtgacaccaaattcaaacaaagactacttattatattggatggaattaggacaaggacatcttgatgaagcgattaatatagccacttatttagatgataacgatattacaaagttagcgttgattaataaattaaatgagattaaaaataacggagatttatcgaatgataaacgttctgaagaaacgaaaaagtataacgataaattgcaagatattttagacaaagaaaaacaagttaaagatgaaaaagcgaaatctgaagaagagaaagcaaaagcaaaagatgagaaattaaagcaacaagaagagaacgaaaagaaacaaaaagaacaagcacaaaaagataaagaaaaacgccaagaagctgaaagaaaaaaatagtataggactgaggcaaagacaatgcataaattgattataaaatataacaaacaattgaagatgctcaatttgcgagatggtaagacatatactattagcgaagacgagcgtgcagatattacgttgaaatcgttaggcgaagtcattcatttagaacaaaataatcaaggtacttggcaagcgaatcatacttctattaataaggtgcttgttagaaaaggtgaccttgatgacattacattacagctttatacagaagctgattatgcatcatttgcgtatccttcaattcaagatacgatgacaattggaccaaatgcgtatgatgatatggttattcaaagcttgatgaatgccatcattattaaagattttcaatcaatacaagaatcacaatacgtacgcattgtgcacgataaaaatacagatgtgtatattaactatgaactacaagagcaactaacgaacaaagcttacattggtgatcatatttatgttgaagggatatggctcgaagtacaagctgatggtttaaatgtattgagtcagaatacagtggcatcgtcattaattcgcttaacacaagagatgccacatgcacaggcagatgattacaatacgtaccatcgttcgccaaggattattcaccgtgaaccgaccgatgatattaagattgaaagaccgccacagccaatacagaagaacaatacagtgatatggcgttccattataccgccattagtaatgattgctttaactgttgtcatctttttagtgagaccaattggtatttatattttaatgatgattggtatgagtacagtaacgatagtatttggtattacaacgtatttctctgaaaagaaaaagtataacaaagatgttgaaaaacgagagaaagattacaaagcttatttggataataaatctaaagaaattaataaagcgattaaagcacaacgttttagtttgaattaccattatccaacggttgctgaaattaaagatatcgttgaaacgaaagcaccaagaatatatgaaaaaacatcgcatcatcacgattttttacattataagttaggtattgcgaatgtagaaaagtcattcaaattagattaccaagaagaagaatttaaccaacgtcgtgatgaactattcgacgatgctaaagaattgtatgaattttacacagatgtagaacaagcaccattaatcaatgatttaaatcatgggccaattgcatatattggtgcacgacatctcattttagaagaattggagaaaatgctaatccaattgtcaacgttccatagttatcacgatttagagtttctatttgtgacacgtgaagatgaagttgaaacattgaaatgggcacgttggttgccacatatgacattgagaggtcaaaacattagagggtttgtttacaatcaacgaacgcgtgaccaaattttaacgtcaatttatagcatgatcaaagaacgtatccaagctgtgcgtgaacgcagcagaagtaatgagcaaattattttcacaccgcaattagtgtttgtcattacagatatgtcattaattattgatcatgtcattttagaatatgtaaaccaagatttatcagaatatggtatttcattaatctttgttgaagatgtgattgaaagtttgccagagcatgtagataccattattgatatcaagtctcgtactgaaggcgaactgattacgaaagaaaaagaattagttcaattgaaatttacacctgaaaatattgataacgtcgataaagaatatatcgcgcgacgtttggcgaatttgatacacgtcgaacatttgaaaaatgcaattcctgatagtattacatttttagagatgtataacgtgaaagaagtagatcagcttgatgtggttaatcgatggagacaaaacgaaacatacaaaacgatggcagtacctttaggtgtaagaggtaaagatgatattttatcattgaacttacatgaaaaagcacacgggccacatggtttagttgctggtaccactggttcagggaaatctgagattatccaatcatacattttatctttagctattaattttcaccctcatgaagttgcgttcctattgattgactataaaggtgggggcatggcgaacttatttaaagatttagtccatttagttggtacgattacaaacttagatggcgatgaagcgatgcgtgccttaacatcaatcaaagccgaattgagaaaacgtcagcgtttattcggagagcatgatgttaaccatattaatcaataccataagttatttaaagaaggtgttgcgacagaaccaatgccacatttattcattatttccgatgagtttgccgaattaaaatcagaacaacctgattttatgaaagaacttgtatcaacggcacgtattggacgttcgttaggtattcatttaatacttgcgacacaaaaaccatcgggtgttgttgatgaccaaatttggtctaactctaaatttaaattggcattaaaagtacaagatagacaagacagtaatgaaattttaaaaacaccagatgcagcagacattacattaccaggtcgtgcgtatttacaagttggtaataatgaaatttatgaattgttccaatctgcatggagtggagcaacatatgacatcgaaggcgataaattagaagttgaagataagacgatttacatgattaatgactatggtcaacttcaagcaatcaacaaagacttgagtggacttgaagatgaagaaacgaaagaaaatcaaactgagttagaagcggttatcgatcatatcgaatctattacaacgagattagaaattgaagaagttaagcgtccatggttaccaccattgccagaaaatgtatatcaagaagatttagtagaaacagatttcagaaaattatggtcagatgatgcaaaagaagtggaattaacattaggacttaaagacgtaccagaagaacaatatcaagggcctatggtattacaattgaaaaaagctggtcacatcgcgttaatcggaagtccaggatatggtagaacaacgttcttacacaacattattttcgatgttgcaagacaccatcgtcctgatcaagcacacatgtacttgttcgatttcggtaccaatggtttgatgccagtcacagacataccacatgtcgctgattactttacagtagatcaagaagacaagattgcgaaggcgatacgtatatttaatgatgaaattgatcggcgtaagaagattttaagtcagtatcgtgtcactagtatttctgaatatcgaaaattaactggtgaaacaattccgcatgtctttattcttattgataactttgacgcagtaaaagattcacctttccaagaagtttttgaaaatatgatgattaaaatgacacgtgaagggctagcattagacatgcaagtaaccttaaccgcctcaagagctaacgctatgaaaacaccaatgtacattaatatgaaaacgcgtatcgccatgtttttatatgataaatcagaggtgtcgaacgtagtaggacagcaaaaatttgcggttaaagatgtagtgggtcgagcattgttaagtagtgatgacaacgtatcattccatattggccaaccatttaaacatgatgagaccaaatcatataatgatcaaattaatgatgaagtatcggcgatgacagaattttataaaggtgaaacaccaagtgatattcctatgatgccagatgaaattaaatatgaagattacagagaatcattaagcttaccggatatagttgccaatggtgctttaccaattggattagattatgaaggtgttacactacaaaaaattaaattaactgaaccagcaatgatttcatcagaaaatccgagagaaattgcgcatattgctgaaattatgatgaaagaaattgacatattaaatgaaaaatatgcgatttgtatcgcagactcaagtggagagtttaaagcttataggcatcaagtggctaactttgccgaagaaagagaagacattaaagcgattcatcaactaatgattgaagacttaaaacaaagagaaatggacggtccgtttgaaaaagattcactttacattatcaatgattttaaaacatttattgattgcacgtatattccggaagatgatgttaaaaaacttattacaaaaggaccagaacttggcttgaacattttatttgtcggcattcataaagaattaatagatgcttatgataaacagattgatgttgcacgtaaaatgattaaccaatttagtataggtattcgtatttcagaccaacaattctttaaatttagatttattcaacgagaacctgttattaaagaaaacgaagcatatatggtcgcaaaccaagcttatcaaaagattagatggtttaaatagcaatgaattaaataggagggaggtatgttatgaattttaatgatattgaaacaatggttaagtcgaaatttaaagatataaaaaagcatgctgaagagattgcgcatgaaattgaagttcgttctggatatttaagaaaagctgaacaatataagcgattagaatttaatttgagttttgcgctagatgatattgaaagcacagcaaaggacgtacaaactgcaaaatctagtgctaataaggacagtgtaactgttaagggaaaggcgcccaatacgttatatattgaaaaaagaaatttgatgaaacaaaagcttgaaatgttgggtgaagatatcgataaaaataaagaatccctccaaaaagctaaggaaattgctggcgaaaaggcaagtgaatattttaataaagcaatgaattaatattgaggtgaagatatgggtggatataaaggtattaaagcagatggtggcaaggttgatcaagcgaaacaattagcggcaaaaacagctaaagatattgaagcatgtcaaaagcaaacgcaacagctcgctgagtatatcgaaggtagtgattgggaaggacagttcgccaataaggtgaaagatgtgttactcattatggcaaagtttcaagaagaattagtacaaccgatggctgaccatcaaaaagcaattgataacttaagtcaaaatctagcgaaatacgatacattatcaattaagcaagggcttgatagggtgaacccatgatgaaagatgttaagcgaatagattatttttcttacgaagaattaacaattttaggtggtagtaaattgcctctcgtaaattttgaattgtttgatccatcaaattttgaagaagctaaagctgctttaattgaaaaggaattagtaacagagaatgacaagttaactgatgcaggttttaaagtggctacattagtaagagagtatattagcgcaattgtaaatattcgaattaatgatatgtattttgcaccatttagctatgaaaaagatgaatatattttgttaagccggtttaaaaataatgggtttcaaatacgaattataaataaagacattgcatggtggtcgattgtacaatcatatcctttattaatgagacaagaaaagtccaatgattgggactttaaacaaattgacgatgaaacattggagaacttaaataatgaaagtatcgatacgattgggcgtgtgttagaaattgaaatatacaatcatcaaggtgaccctcaacaaagtttatataacatttatgaacaaaatgatttgctactcattcgatacccattaaaagataaagtactgaatgttcatattggcgtcattaatacatttatacgagaattatttggattcaatactgatgaaaatcatattaataaagcagaggagtaatgacgttgagtggaaaaattagtgttaaagctgaaacgattgcacatgttgtaaaagaattggaaagcattagtcaaaagtatgatgaaatagctcaaaactttgggaaaatagcgcaattaaattactacagtagtgaaaaagctgcacattctatggaaaatggctatagtagtgctgcaacagtcattagtggtctcaaaggtccattgagtacactcggtggtggcgtcatgaattcagcacaaaaattctttgaagcagatgaacattggggtacggaatttgccaagctttactataatattgagggataggtgcatgacatgacaaaagatattgaatatctaacagctgattatgacaatgaaaagtcatctatccaaagtgtaatagatgcaatagagggtcaagacttcttagatgtagatacaacaatggatgatgcggtaagtgatgtcagttctttagacgaagatggcgcaatatcattaacaagtagtgtagtaggtccacaaggatctaaattaatggggtattatcaaaatgagctatatgattatgcatctcaattagattcgaaaatgaaagaaattattgacacgccatttatagaagatatagataaagcattcaaaggtataacgaatgttaaattggaaaatatattaataaaaaatggcggaggtcatggtagagatacctatggggcttctgggaaaattgcaaagggagatgccaagaaaagtgacagcgatgtttatagcatcgatgaaatattaaaatcggatcaagaatttgtaaaagtaattgatcagcattacaaagaaatgaaaaaagaagataagaaattatctaagagtgattttgaaaaaatgatgactcagggtgcttcttgtgattacatgacagtagctgaagcggaagagatagaggagcaaaagaaaaaagaattggcagttgatattttagcgggtgtcggaattatagctttaactatagtcaaccctgtcgcaggtgcagtagcagcaggtgcatataccgcttattcagcagccaatgcagccacaggaaaaaatattataactggaagaaagctatctaaagaagaacgaatcatggaaggactttcgcttattccattgccaggtatgggcttcctcaaaggtgctgggaaaagtttaatgaaattaggcttcaaaggcggagaaaaatttgcagttaaaacaggattgcaaaagacaatgcaacaagcagttagtcgtatttcacctaaaatgggaatgatgaaaaacagtgtgttgaatcaatctcgtaactttgctcaaaatactcatgttggacaaatgctgagtaacatgcgtggtcaagcaacttatactgttcaacaaagtagaaattggattggacaacaagcacaaaatgtcaaacgaatagtgaataatggacttgataaagaatttgtaattccatctaaacaacagcttgcatcggcgggaataggcggtataaactttgctgaaacaactactttgagaaacatgggtcaaaacatgaaacgtgctgttacaccacaaaatcacgtgacacatggtccaaaagatagtatggtgagaagtgaaggcaaacatagtgtaagtagccatgaaattaattcatcaaaatatgttgaatcaccaaactacaccaaggttaaatatggagagcaatatgcaagacttagacctaagaaactaaaggcgaatattgaatatacaacgcctaatggtcacatatatcggactgatcataaagggcgcataaaagaagtttatgtagacaatctctctctaaaagatggagatcgtaataactatgcacaaaaaactgtaggtggagaggatagattaccagacgatgatggaggtcatttaattgctagaatgtttggtgggtcaaaagacatagataaccttgtggcacaaagtaaatttatcaaccgttcatttaaggaaaatggacaatggtataatattgagaaagagtggaaaaatgctattaattctggaaaggaagtaaaaaatattaaaatggaagttaaatatagtggtaatagtaaaagaccaaccgaatttttggttgaatatatagttaatggaaaagaaatatcgaagtcaataaaaaatatataggagcgataacatgacttttgaagaaaatttaagtaaaatgtacaatgaaattgcaaatgagatcagtgggatgataccagtagagtgggaaaaggtatatacaattgcttatgtagatgatgaaggtggagaggtcgtttttaattatactaaacctggaagtgaagaattgaattattattcagatattcctaaagattgcaatgtctcaaaagatttatttaagaattcatggtataaagtttatcgaatgtttgatgagttaagagaagtttttaaaaaagaagatttagaaccgtggacatcatgtgaatttgactttacaagagaggggaatttgaaagtatcatttgattatatagattggattaaattaggttttggcccatctggaaaggaaaactactatatgtataaaaagtttggtgttttaccagaaatggaatatgaaatggaagaaattcgagaagtagagaaatatgttaaagaacaagaagagtaattcgataatagacaatcttaatgtaagactaaacaataaagctttgtttagtcttttttggcggttaagtaaaaagcaatagagaatataaagttgatactcatcaaataataatataaaggtaattttaggttttcatacttttaatcgaaaagaatctaagtatatagctttaaatacgtaatatgctattacaaaatcaatgtataggagatagatatgactactaaggaaaatatagacattcttcgaaagccaggtgcacaagccttaagtttagcatcattatttatgatacttttttcatgtctaactttcttttttggtttagattataaaaggtttccaaattatttaaagataacgacaattatagaattaataattatcataattagtttacttcaatggattagatttatagatttcgaaaaggaaagcgcacagaaatataaaaaaatatatgcccgatttttagttgttataaatgtgctaactactatcactgcagtatttgcaacatgtaacctttattattttgttgctgtacaaaatcattatgacctattcaattattggttgatgggtacgatttcaatcataattagttatttgttattagtaattggcggaatgttcacgttattaaaattacctaaagtaacaaaacgttggggtggtaaaactaaaacccattttggtttattattaactgcgttgagcgcatttatatatattgaaagaattatcgaatatatattggtgcccaatgtcgtagaatccaagtttgtcataatggtaagtatcattattattgcttgtacacaatttgtagcctttcaatttattatgcaatacagtagattctatatttttgaattaaacacagaagatgatgactaaatgattttgtaaattactattggagtatacttatataaaaaatcaacttcaacgtatatcaccatattattttatactcaatgatgtgaatggatttaaatggatcgatattaaagtaaaagttatggaatattgaggtgcgaatatggagttcttattattaattgtcgtagctggactgtattatattatatatttaactgctgtgatgtattctgaaaaaatagtagtattgcctataatcatctatgccattgtgtttgtagtaattggtatcacttatatttttataggtgacagctatgatcagttaacaaatttcaatgttattttgtatatggggagtttgttttatgcatggatggcttttagaaatctttggaacagaccactattactaaaatataagaacattacagatagttcaagtggaatagttaataaatctgaatacaattcagttgaaagcttacgtataaacattgaaatagctaagtataaagggattatttctttgatagtagctatagtactaacggtattaatgacattaaagtcaacacctcaaatcactgcagaaacacgtgacttaagtatctcatttttcatactcggcttatttatcattataatatttgcagtttgggatttgattattagagttagaaagggaacgtttgcttttgttgtaataaggccaatattatttagttgctggttatttattttgaatatgattttatcaagattattataatgataagaagttgaataaattgtaatgtgaaaaatcattgagaatttcaattattgtaacaatagtttcagttattttagtttcattagtttatttaggtttaaaatgagtaatattattttgaagaagcattaatccacgtagaagtgttgtttaatgctttttatttaacggtaatgaaaatataggggcgataacatgactttcgatgaaaaactaagtgaaatgtacaataaaattgcaaatgagattagtgggatgatacctgtagagtgggaaaaggtatatgcaatggcttatataaatgaaagaaatggagaagtgttctacaattatactgaaccaagaagtgatgaattagtttactatacgagcgtgttaaataaatataatatatcaagatcagaatttatggactcagtatatgaattatataagcaatttgataatttaagagaattgtttatagaagaaggactcgaaccatggacatcatgcgaattcgactttacaagcgagggtaaattaaacgtatcttttgattatattgattgggcgaattcagagtttggacaaatgggaagagaacattattacatgtataaaaaatttggaatttggcctgaaaaagaatatgccataaattgggttgaaaaaataaaagattatgttaaagagcaagaagaagctgaactataggggagataacatgactttcgaagaaaaattaagtcatatgtacaacgagattgcgaatgagattagcagtatgatacctgtagagtgggagaatgtatatacaattgcctacgtaactgaccaagctggggaagtcatttttaattatactaaaccaggtagtgatgaattgaattattattcagatatacctaaagattgtaatgtctctaaagatatttttaagaattcatggttgaaagtttatcgaatgtttgatgagttaagagaaacttttaaaaaagaagggctagaaccatggacatcatgtgaatttgattttacaagagaaggtaaattgaatgtatcatttgattatatagattgggttagattaggttttggaccattagcaaaagaaaattattatatgtataaaaaatttggagttatgccagaaatgaaatatgaaattaataaagttaaagaaatcgaacaatatattaaagagcaagaagaagctgaactataggggagataacatgactttcgaagaaaaactaagtgaaatgtataacgagattgcgaataaaattagcagcatgataccagtagagtgggaaaaagtatatgcaatggcatatatcgatgaagaatgtggagaagtgttttacaattatactgaaccaagaagtgatgaattattttactatacaagtgtgataaagaagtataatttattgaaatcaagctttatggattcagtatatgagttgcatgatcaatttgaggaactaagagagatatttatagaagaaggtcttgaaccatggacatcatgcgaattcgactttacaagcgagggtaaattaaacgtatcttttgattatattgattggactaaattagaatttggtcaaatagcaaaagaaaattattatatgtacaaaaaatttagaattttaccagaaacggaatatgaaattaataaagttaaagaaatcgagcaatatattaaagagcaagaagaagaatagacaatcttaatgtgagactaaacaataaagctttgtttagtcttttttggcggttaagtaaaaagcaatagataccgtatagttgatgctcatcaaataataatataaagataattttaggttttcatacttttaatcgaaaagaatctaagtacttatagctttaaatacgtaatatgctatttgaaaaataatgtataggagatagatatgattactaaagaaaatattgatactcttcgaaagccaggtgcacaagccttaagtttaatatcattgtttttgatacttttttcatgtctgactttcttttttggtttagattatgaaaggtttcccaattatttaaagataacgacaataatagaattaataattatcataattagtttacttcaatggattagatttatagatttcgaaaaggaaagcgcacagaaatataaaaaaatatatgcccgatttttagttgttataaatgtgttaactactatcactgtagtatttgcactgtgtaacctgtattattttgcagctgtacaaaaccattatgatttattcaattattggttaatgggtacgatttcaatcataattagctatttattattagtaattggcggaatgttcacgttattaaaattacctaaagtaacaaaacgttggggtggtaaaactaaaacacatttcggtttattattaactgcgttgagctcatttatatatattgaaaaaattatcgaatatatattgattcctaatgtcgtagaatccaagtttgtcataatggtaagtatcattattattgcttgtacacaatttgtggcatttcaatttattatgcaatacagtagattctatatttttgaattaaacaaagaagatgatgactaaataattttataaattactgttggagtatacttatataaaaaatcaacttcaacacattattttactcaatgatgtgaaagaatttgagtggattgatattaatgggatttgattattagaattagaaaaggaacgcttgcttttgttgtaataagtctaatagttttcagttgttggttatttattctgaatatgattttatcaagattattataattgtattacatatagttgttggtaaatttttatttacgaaatggtaaaaaagtatatactattaatatcttttttactataattataaatagttaaataaattgaaagacaaaataatgagtaggagttttagggctattatttacaaataatataatactgcaaagactcgaaattatttagaattccacttatcgtaacaatagttgcagttattttagttccattagtgtatttaggtttaaaatgagtaatattaatttgaagaagcattaagcgacgtagaggtgttgtttagtgctttttatttaacggaaatgaaaccaatatctattttgaaaatataggggcgataacatgactttcgaagaaaaactaagtgaaatatacaacaagattgcgaatgagatcagtgggatgataccagtagagtgggaaaaagtatatacaatagcctatgtaaatgatagaggtggagaggtcgtttttaattatactaaaccaggtagcgatgaattgaattattacacgaatatatctagagattataatgtttcggaagaaatatttgatgatttatggatgaatctgtattacttgtttaagaatttaaggaatttatttaaaacagaaggacatgaaccatggacatcatgcgaatttgactttacaagcgaaggtaaattaaacgtatcttttgattatgtcgattggattaaattaagtttaggtccgttagctagagaaaattactatatgtataaaaaatttggggttataccagaaatggaatatgaaatggaagaaattaaagaaatcgtgcaatatattaaagagcaagatgaagctgaaatataggggcgataatatgactttcgaagaaaaactaagtcaaatgtacaatgaaattgcaaatgaaatcagtgaaatgataccagtagagtgggaaaaagtatatacaattgcttatgtagatgatgaaggtggagaagtcgtttttaattatactaaaccaggtagtgatgaattgaattattacacatatatccctagagagtataatgtctctgaaaaagtattttatgatttgtggacggatttatatagattgtttaagaagttaagagatttatttaaagaagatttagaaccatggacatcatgtgaatttgattttacaagtgaaggtaaattaaacgtatcttttgattatattgattgggtgaattcagaatttggaccaatgggaagagaagattattacatgtataaaaagtttggaatttggcccgaaaaagaatatgccataaatagggttaaaaaaatagaagattatattaaagaacaagaagaaactgaactataggggagataatatgactttcgaagaaaaactaagtcaaatgtataacgagattgcgaatgagattagtgggatgataccagtagaatgggagcaagtatttacaatagcctatgtaactgatcaagctggagaagtcatttttaattatactaaactaggtagtgaagaattaaattattattcagacatacctaaagattgcaatatctcaaaagatatttttaagaattcatggtttaaagtttatcgaatgtttgatgagttaagagaaacttttaaaaaagaaggtcttgacccatggacatcatgcgaatttgactttacaagagaaggtaaattgaatgtatcttttgattatattgattggataaattcagattttgatcaattgggccgtgaaaattattatatgtacaaaaagtttggtgttttaccagaaatggaatacgaaatggaagaaattaaagaaatcgagcaatatattaaaagccaagaaagttaattatgggaaagaggttaagcaataagatttgtttaatcttagtttgctgcaatttaaaattgctgatatttctaggaagaatcattcgaaattggaagatcaaagtgaaaacgaactcataagtgcctcaataacaaattgtataaaaaatattgatgataacatcgatagactcatcgataaaattaccgagatgcaaaatgaagttaattcattagatagtacattatctgtactagaaaatgcaaaaaattcaatagttgctgctattgaaaaattaactaattaaaggagcagaaatggaaaaaataaagagaataaacaaaatatttttatcatttgaagttattccatttgcaatgatgattttactggcgtttctaccagttattgcaggtataataaataatcgtttgcagtatggtagggattttggcgatagagtaagcttttattgttatatttcaattatggttgcatatgcaattaccatattgttagaaattattttttactttattttattgaaaaactatcaatatgatcaaagtaatattgaattagctaataggatgaaagttacaaaagtattgtcgattctgtatatcattccaggattatatgcgattccattctattttagatttttacatattcgctcatttagagaaaataaaaaatccggacagccggcctatcacttttgggaattttttataaaacctaatcgcaaaccgatagagttgaaagacttttttattaaaaatagataattaaggagtaaccgatgaaaagattatgcataggattgttaattataatgatgagtataataaattatggttgtggtaatgagcaaaatgaaaataaatatcaaagtcaaattaataaagtaatgaaaattcaacaagaaactcataaagagatggttaaaaagagtaatgaagttaatcctgaatttaataaggataaagtaaatacttatgtatttgatgatggcaaattaattatcatcagctataagttatttaaagataaagatcaaatgttttacgcgacttacgagtttaaaaacgacaaaatttattataagagagatattaatcctaaaacatacgtgaaagaacacaaatcagattataaagatattaaagtaaaataattttaaggagtaggaaaatggaaaaattaatcaaagtgacgtctttaattggaattattattcaaagttttttaacattgttatttttaatatttttaattttatcagcaacaggaattatacagccagaattgaccacaactgttaatggtgaacaaactatacaaagtccagaaactgctcaagcaacattcgtgacaatatttgcaatattatttgttgtttctttagcttcagatttattaggcattatagctatgaaaaagttgtttgtgaataatagagcgagtggcattttgtatattattggtgcagtgatcagtgccaatttattaacatttattgcttggttaataagtgggatttctgttttaagatataacaaaataggaaaagaagtgtcatagcatgaaatatacttggtggatacttttaacaattgcagggattttaagtttagcaagtgtttatggatttattttatgtttaggtagctttggaatgttggcaatgaatgtcatgtggctatttgtttatacaccgcataaaaattctaaagcacttgaatctatatcaaaaccaacgataattttatcaatcattgggacatatgcagtatttatatttatgtctatcttattttacttcgtaatgaaagctaggtttatggaaattggaataaaactttacggtgaactttttaatatgtttggaataccattattcattattgctatcattttatttacaatcggtacagtattcgtttataaaatacagcaatcaagattaaagcaatagaatatattaatttaaaataggacgggtttaaaagaaatccgtcctaatgatttatacataatagatgtagctgaatctaaaagacttcaaatactttgaagataaaaagataatgacaatgaatgtaaaatgtgattttttcaatattaaaatataaaaaatgtaatggtttagaaagcgaatctaaattttaataatgattaatgaaaggtagatgaacatgagtaactcaaacggtttgttaaatttgtcccttcatttatttgcgttgaaaatcacgaggctgtttccattttcgaaaaatggaaacgtgtattgtaagtaaaaactctgaaggatttaagaaaaatatatagtttcaagatgatgaaccaatttagggtgaaaatttaaatggatgcatatatttagattttactaaattgtaaaaatagaatttcaagttatttgaatgtatttataaatatatcgttattattaaagtagagattaggggagataatatgactttcgaagaaaaactaaagtcaaatgtacaccgagattgcgaatgagattagcagtatgataccggtagagtgggaaaaggtatatacaatggcgtatatagatgatggaggaggtgaagtattctttaattatactaaaccaaacagcgatgaattgaattattacaccgatatacctaaggagtataacatttctgtgcaagtatttgatgatttatggatggatttatatgatttgtttgaggagttaagagatttatttaaagaagaagatttagaaccatggacatcatgcgaatttgattttacaaaagaaggtgaattaaaagtttcatttgattatatagattggataaatacagagtttgatcaattgggccgtgaaaattattatatgtacaaaaaatttgaggttataccagaaatggaatatgaaatggaagaaattaaagaaatcgagcaatatattaaagagcaagatgaagctgaactataggggagataatatgactttcgaagaaaaactaagtcaaatgtacaatgaaattgcaaataaaattagcagtatgataccggtagaatgggaaaaggcatatgcaatggcttatgtaaatgaaagaagcggagaagtgttctacaattatactgaaccaagaagtgatgaattagtttactatacgagcgtgttaaataaatataatatatcaagatcagaatttatggactcagtatatgaattatataagcaatttgataaactaagagatttatttaaagaagaaggacttgaaccatggacatcatgtgaatttgactttacaagagacggcaaattgaatgtttcatttgattatattgattgggcgaattcagagtttgatcaattaggccgtgaaaattattatatgtataaaaaatttggagttataccagaaatggaatacgaaatggaagaaattaaagaaatcgagcaatatattaaagagcaagaagaagctgaactataggggagataacatgactttcgaagaaaaattaagtgaaatgtacaatgaaattgcaaatgagatcagcagtatgataccggtagaatgggaaaaggtatatacaattgcctacctagatgatgaaggtggagaagtcgtttttaattatacaaaaccaggtagcgatgaattgaattattacacggatatatctagagattataatatttcagaagaaatatttgatgatttatggatgaatctttattacttgtttatgaatttaagggatttatttaaaaaagaagatttagaaccatggacatcatgtgaatttgactttacaagagaggggaatttgaaagtatcttttgattatattgattggattaaattaggttttggaccatcaggaaaggaaaactattatatgtacaaaaagtttggtgttttaccagaaacggaatatgaaattaataaagttaaagaagtagagaagtatgttaaagagcaagagtagcatatatgttatagaaggctgtgcaaaaccaacctcgttttacatttgactcaaagaagaaggtaaacgataagattatttgcaacttaaaaagtctattagcttctcggtatccatacatcatatgtataaatgagtttaactaattaataaatcacgatataaatttaaaattgccattaattgaaaaggttattgtagtgtattttataaagttgatgcacatcgacttattttttaaaacttatatcaaaaaaatatgagaaaagtatatactattaaaatgttttttactataattataaatagttaaatatttggagattaaataaatatataggaggcaatttttagagatacatagcaatgtaaaggtatcaaatagttattgcataatttattatgatgacataattttcagtagatagttgtaaattaacactggaatagatgtttatattaaacagactttaatatcataattaatcaaaatcttgcgtcaaacatttaaacgaattttaagttgataacaattggctaaacattgttcaaacatcacaatgataaagaatattatcagtattgtagtgtgtggaaaatgacagccatctaaggagaaaaatgatgaaaagaatgttggtagtatttttaatgttagcaattgtattggcaggttgttctaataaaggtgaaaagtatcaaaaagatattgataaagtgtacaaagaacagaatcaaatgaataaaattgcctcgaaagtacaaaacactattaaaacagacattaaacaagaagacagtaatacacatgtttataaagatggtaaagtcattgttattggtattcaattgtataaagatcgtgaaaaaatgtattatttcgcatatgaaataaaagatggtaaggcagaaatcaatagagaaatagatccaattaagtatatgaaagaccataaagcagattatgaagatgaaaatgtagaagtggaaaaagattaatgtatgctttctttaaaacttttaaccagtttcaaaaagtaaatgagctttagcgacaataatttttaaaataaacacgatataaatttaaacatttatatataagaacacaaacgtaagtttgtaaataataataaaggagtaagacaatggaaaaatcgatcaaaataatgacaataataggaattgttgttcagggtttagcaacggtatttagtttactatttatggttttagcagcatcaggtgtaatgactacagatgtgtcaacaacagttaatggtgaggttgacccagttgatgcagaaacagcagcagcaattttcactgtattattcttattcctatttatatttggaatcatttcaattattttaggtgcaatcggtatgtttaaagcatctaaaaacaaaaaaatgagtggtatattgttgattattggagctgtaataagtggtaacataattacatttgctttatggttagtcagtggtattaaactacttactaataacaagcctaaagatcaaataagcgacttatcataaacatcgtatattgaaatttcaagatttcttaagtaattatatttctgttaggttttaacaaattaaccgattaaataaagtgctctcttagaagtagattttcagtcaataactgcttttaagagagtattttgtatttgataataagcatgccatcggacaaaaagcattgacgaactttaaaaaaatacgttagacaatgcacttctaaatattaaaggcatcgactaacgcattgttcaaatagagttaattatttttataaaattgatgatgatcattcaagtaagcatagaataaacctataatgagaccgcctccgatatagttaccgataaaagcggcagcaatattcgaaatagctggtatggagtgcaatgtatcaacttgataaattaaaccacccataaataagcaactgttgtaaactacgtgttcataacccataaaggcgaatatggtaacaccgaacatcatgacaaacatttttgcgagtacatcgtcaatttgcatggcaataactaatgaaatattgataaagaaattggcgaatatcgctttcattaatatacttacaaaaccagtagacaacgttttatgctcaataactgctgataactgatttaacatatctggcgtcattacatttgaaaaacgcatgaaactaaataaaatagcagcacctaaaatatttcctgcaaagcacaataaaaatattttcaatactctagtcggtttaattactttataatacaggcctacagtaaagtacatgaagttactggttagtagttcggagtttgtaaataaaatgagtactaacgcaaaactgaatgtaatggcgctggccatattcacaatgcctggcggtaaatctggttcgtgtgttgctttaactgatagcacgaagaccgtaataataccgataataaatcctgccatcatagcgcgtaataaataacgttttaaataaacgctttgtaatatatctttcgttcttatcgtttcgactacgttatttacccagtcgtccccataaaatattttatcccatttaatatgtttctccttcacaatgacatcctcacttttcatttgttaatcagagtatactatgaatcgccttatttgtgaataatttcacaaaattaattttaaaaactaatatttttgaataacagctaggattttttaacaaatcatttattttaaaataattaatcgtcagttagtatcaatgaataaatacagattttcatgcaaaaaaaacctagtaatgatgcgacgatcattactaggagattatgcatctattaagttgtcgcttgtttcggacgacgtataactacatcgatgatgaaacctatgattgccaaaagaatgaatggtacaagccaagctaaatcgatatctgctaaaggtaacatcataaaccatttcaaaataacaccttgtaataagttgaaactatttagtatttgtaaaattgaaataatcaatgtaataacagttgcgagtcgataggcccaactgaatctgaatgtgctaaacatgttagcaaatgatatcagtacaagtgcaatagacacgggatatattaatgtcaacaatggtacagcaatttttaaaatcatttctaaaccaagtgttgtaaataaaaatcctatgatagagaaaacaagtgcgaatattttataagaaaacttaggcacgtgtttcttagtaaatgttgcacaagcgttgacgagtcctatacatgttgttaggcatgcaagaataaccgtcattccaaatacgaggttaccgaacgaaccaaatacgcgtaatgaattgtacgtcaatatatcagtaccatctttaaagtttcctggagctgttgacgcacctacatatgccaacgcaaagtaaatcataccaagtaatatggctgcaataagacctgaaaagcagacatattttaatattttcatgcgatctgtgaggcctttaaacttatagccattgacaatgactacggaaaaagctaatgctgcaacgagatccattgtaaaatagccttccaaacttcctgcaatgaaaggatgtgttatatatttatccttaggtgcacttagtgcagattcagggttgaaaatgacagcaatgcttaatagagcgaccattaatagtaataacggtgttaataattttcctaaatgatcaacgattttcgatggatttaaactaatccaataaacgatagcaaaaaagattgctgcgaatataattaaagtccattggttatgtactggtaaaatgtgtcttgtgccaatttcatacgcgacatttgcagcacgtggaataccgtaaaatgccccgatagacatgtaaatgacgacagcgaaaataaacccgaaccatggatgtatacgattgcctacactttcaacaccttcatcataaaatgcgacaacgataacagtaataaagggtagtaaaatgccagtaagggcaaagccaaacatgccaatccacatattttgacccgctgtatggccgagcatgggcgggaatattaaatttccggctccaaaaaatagtgaaaataacatgaggcccgaaataataacttgtttttttaatgtaatttccttcctaaaactagatattcataataatttaaaaaatctgaaaaataaaaacgtacttactttatctttaaatgacaatactatgattctattattttataaaaaagattgcaataataacgtcttgctattattggataatgacaattaaagtgtcgtttttatgaattaaaataggtgaaagtaagttggaaatacgttggagcgttgtgatttttatgagaaattgtatgagtgaggactgctatttataaaaggtaaactatggatgggtttatggttgttccaataggtaaataagagatagcacactgtacacataatgatacgtggatgagttaatatgtctgatagaaaggcctagtcactcaaatgaatttaagtttattacgtgataaatcacaaatctctctcatgtgataggtctcccattaaatcatgcttatatgaaatgttcacatatttgttagcttttcaagaaataatattaaatatcttttcatagtatagcaatattaaataaatgcatttataattttaactgtattttaaatattaatcatgaggtgataagatgaataaaatttcaaagtatattgcaatagcatcattatcggtagcggttacagtttcagcaccacaaacgacaaattctacagcgtttgccaaaagttctgctgaagttcaacaaacgcaacaagcttctataccagcatcacaaaaggtgaatcttggtaatcaaaatattatggcagtggcttggtatcaaaattcagctgaagcaaaagcattatatttacaaggttataacagtgcaaagactcagttagataaagagattaaaaagaataaaggtaaacataagttagctattgctttggatttagatgaaacagttttagataattctccatatcaaggctatgcatcaatacataataaacctttcccggaaggttggcatgaatgggtacaagctgctaaagctaaacctgtctatggcgcaaaagaattcttgaaatatgctgacaaaaaaggtgtcgatatctactatatttctgatagagataaagaaaaagatttaaaggcaacacaaaagaacttaaaacaacaaggtatccctcaagctaagaagagtcatattttactaaaaggtaaacatgataagagtaaagaatcacgcagacaaatagttcaaaaggatcataaacttgtcatgctatttggagataatttattagactttacagatccaaaagaagctacagctgaatctcgtgaagcattaattgaaaaacataaagacgatttcggtaagaaatatatcattttccctaacccaatgtatggtagttgggaagctacaatttacaacaataactataaagcaagtgacaaagcaaaagataaattacgtaaaaatgctattaagcaattcgatcctaaaacaggcgaagttaaataatatatgaattggacgtctacatgtacttaaaggtatatgtaggcgtttttaaattgatccttaattttaaatgtaccgtacaaaaataatagacaattaattgcattttccataaatttgcttttaatataaaaagttcgggtataatgaaggataagtgtatgtataacattacagagcgcaacacgacgtacgtgcatctaagaatataaacaatgtttaaatcatagtagtagggagagaaatgcatgtttttagcttggaatgaaatacggcgcaacaaattgaagtttggactaattattggtgtgttaacgatgattagttacttgctatttttattatctggattggcgaatggtcttatcaatatgaataaagaaggcattgataagtggcaagcagatgccattgttctaaataaagatgccaatcaaactgtgcaacaatctgtttttaacaagaaagatattgaaaataaatacaagaagcaagctactttgaagcaaacaggtgaaattgtctctaatggccatcaaaaagacaatgttttagtgttcggtgttgaaaagtcatcatttttagttccgagattaatagaagggcataaagcgactaaagataatgaagtgttagctgatgaaacacttaaaaataaaggatttaaaattggtgacacattatcactatctcaatcagatgaaaaattgcatatcgtaggttttacagaaagtgcaaaatataatgcgtcaccagtcattttcacgaatgacgctaccattgccaaaatcaatcctagattgactggagataaaatcaatgcagttgttgtacgtgatacaaattggaaagacaaaaaattaaaccaagagcttgaagcggtaagtattaatgactttattgaaaatttaccaggttataaaccacagaacttaacattaaactttatgatttcattcttatttgtcatttcagctacagttataggcattttcttatatgtcatgacattacaaaaaacaagtttatttggcatattaaaggctcaaggatttacgaatggctatttagcgaacgtagttatttcgcagacgctcatattagcattatttggtacggcatttggtttactgttaacaggcgttacaggtgcatttttacctgatgcagtacctgtcaaattcgatgtactaacattactcgtatttgcaattgtgttaatgattgtctctgtattaggaagtttattctccattttaacaattagaaaaatagatccgttaaaggcgattgggtaggaggtgtagcaaatgttgaaatttgaaaatgtaacaaagtcatttaaagatgggaatcgtaacattgaagcggttaaagatacaaattttgagataaataaaggtgatattatagcattggttggaccttctggctctggtaaaagtacatttctaactatggcaggtgctttacaaacgccgacatctgggcacattttaatcaataaccaagatattacgacaatgaagcaaaaagcattggcaaaagttagaatgtctgagataggttttattttacaagctacaaaccttgtgccatttttaacggtaaagcaacaatttacattattgaaaaagaaaaataagaatgttatgtctaatgaagactatcagcaacttatgtcacaattagggctaacatcattgcttaataagttaccttcagaaatttcaggtggtcagaaacaacgtgtggccatagccaaagcgttatatacgaatccgtcgattattttagcggatgaacctaccgcggcgttagatactgaaaatgcgattgaagtcattaaaattctacgtgatcaagccaaacaaagaaagaaagcatgtattattgttacacatgatgaacgacttaaagcatattgtgatcgttcatatcatatgaaagatggcgtccttaatcttgaaaatgaaacagtagaatagttttattaagccggtacatcatgtgccggtatttttatgtttatgtattatttgaataaactttcacattcaattaataataattattatcgaaaattagaaatattccgtgaaatataatattttttgtagtaaaatggcctctaagtattcaatatttaaatatggggattgaatataaaattatcgtaatgggggtcaatggttatggatttattgataggtactttatttttatttttggtcttagtgatttttacattatttacatataaagcgcctaatggtatgcgcgccatgggagcattagctaatgcagcaatcgcaacatttttagtagaagcatttaataaatatgttggtggcgaagtattcggtattaaatttttagaagagctaggagacgctgcgggaggtctaggtggtgtcgctgccgctggattaacagcattagctatcggggtgtcaccagtatatgcattagttatagcagccgcgtgcggtggtatggatttattaccaggtttctttgcgggttatatgattggatatgtgatgaaatatacagagaaatatgtgccggatggtgtcgacttaattggatcgattgtcatcttagcgccattagctcgtcttattgcagtattattaacgccagtagtgaatagtacattgattagaattggtgatattatccaaagtagtacgaatacgaatccaattatcatgggtatcattttaggtggtattatcacggttgtcggcacagcgccattgagttcaatggcattgacagctttgttaggtttaacgggtgtacctatggctattggtgccatggcagcatttagttcggcatttatgaatgggacgctattccatcgcttaaaattaggtgatcgtaagtctacgattgcagtaagtattgaacctttatcacaagcagatattgtatcagccaatccaattccaatctatattacaaatttctttggtggtgcgattgctggtttaattattgctatgtcaggtttaattaacgatgcgacaggtacagctacaccgattgcaggatttttagttatgtttggatttaatcatccgacgacaattgtgatttatggtgtagtaatggcgattgtaggtgcgcttgcaggttatcttggttcaatcgtatttaaaaaatatccaattgttactaagcaagacatgattaatcgaggtgcagtagacgcataacatcatcatattgaatagtaaaaacaaataaaacatagtaacgtgattcagtcgatgtaaaagtcgataatgagtcacgtttttttatagaaaatataagacataaaaatgtcataatttatagtcgacaaatatcatactgtataaacatttatcattttctcaagtgccttttacgcgatggaatgaacttactttttacgaaattatgcgtattttataaacaaatatcattgatataacggtaaatgtaagcgtttacaacagaaataactgcatgctacgatatttttgtaaattcactgattcaattattttaagtcaatatgaggagggatgttatgagcgattctgagaaagaaattttaaaaagaattaaagataatccgtttatttcacaacgtgaacttgctgaggcaattggattatctagacccagcgtagcaaacattatttcaggattaatacaaaaggaatatgttatgggaaaggcatatgttttaaatgaagattatcctattgtttgtattggcgcagcgaatgtagatcgtaagttttatgtgcataaagatttagttgcagaaacatcaaatcctgtaacgtcaacacgctctattggtggcgtagcaagaaatattgctgagaacttaggtaggcttggcgaaacggtcgcttttttatctgctagtggacaagatagtgaatgggaaatgattaaacgattgtccacaccatttatgaatttggatcatgttcaacaatttgaaaatgcgagtacaggttcatatacagctttaattagtaaagaaggcgacatgacatatggcttagcagatatggaagtgtttgactacattacgcctgaatttttaattaagcgttcacacttattgaaaaaggctaagtgcattattgtcgatttgaatttaggcaaagaggcattaaacttcttatgtgcctataccacgaaacatcaaatcaaattagttatcaccacggtttcttccccaaaaatgaaaaatatgcctgattcattacatgctattgattggattatcacgaataaagatgaaacagaaacatacttaaatttaaaaatagaatctactgatgatttaaaaatagctgctaaacgctggaatgatttaggtgttaaaaatgttattgtgacaaatggcgtgaaagaactcatttatcgaagtggtgaggaagaaatcatcaagtcagttatgccatcaaatagtgtgaaagatgttacaggtgcaggtgattcattctgtgctgcagtagtgtatagctggttaaatgggatgcctactgaagatatattaattgctggtatggttaacgcaaagaaaacgatagaaacgaaatatacagttaggcaaaacctagatcaacagcaactttatcacgatatggaggattataaaaatggcaaatttacaaaagtatattgaatattctcgagaagttcagcaagcacgggagaacaatcaaccgattgtagcattagaatcaacaattatttcgcatggtatgccgtacccacaaaatgttgaaatggcaacaacagtagagcaaattatcaggaataatggtgccattccagcaaccatagccattatagatggcaaaattaaaattggtttagaaagtgaagatttagaaatacttgcaactaataaagacgttgctaaagtgtctagaagggatttagcagaaattgttgctatgcagcgtattggtgctactactgtagcgacgacgatgatatgtgctgcaatggctggtattcaattttttgttactggaggtattgggggtgtccataaaggtgcagaacatacgatggacatttcagcagacttagaagaactgtctaaaacaaatgtcactgttatctgtgcaggtgccaaatcaattttagacttacctaagacaatggagtatttagaaacaaaaggcgttccagttattggatatcaaacgaatgaattgccagcattcttcactcgcgaaagcggtattaagttaacaagttcggttgaaacgccagaacgacttgctgacattcatttaacaaaacagcagttaaatcttgaaggtggcattgttgttgctaatccaattccatatgagcatgccttatcaaaagcatatattgaggcaatcataaatgaagctgttgttgaagccgaaaaccaaggtattaaaggtaaggacgccacaccgttcttgttagggaaaattgtagaaaaaacgaatggtaaaagtttagcagcaaatataaaacttgttgaaaacaatgcggcgttgggtgctaaaattgctgtcgctgttaataaattattgtaggtgatgatacatgaatattttattcgctatcacagggatagcatttgcactatttgttgcgtttttattcagttttgatcgtaaaaacatagacttcaaaaagacgttaataatgatatttattcaagtgttgattgtgttatttatgatgaacacaacgattggtttaacaatcttaactgcattaggttcattttttgaagggttaataaatgttagtaaagcaggtataaactttgtttttggagatatacaaaataaaaatggctttacattctttttaaatgtgttgctgccattagtgttcatttctgtattaataggcatttttaattatattaaggtattaccatttattatcaaatatgtaggtattgctattaataaaataacgagaatggggcgtttagaaagttactttgctatttcgacagcgatgtttggacagccagaagtttatttaactataaaagacattataccaaagttgtctagagcaaaattatatacaattgcgacatctggtatgagtgctgttagtatggcaatgttgggttcatatatgcagatgattgagcctaagttcgtagttacagcagtaatgttaaatatttttagtgcgcttatcatcgccagtgtaatcaatccctataaatctgatgatactgatgttgaaattgataacttaacgaaatccacagaaactaaaacattgaatggaaaaacaggaaaacctaagaaagttgcctttttccaaatgattggtgatagtgcaatggatgggtttaaaatcgctgttgtagtagccgtaatgttgttagcatttatttcactaatggaagcaattaatatcatgtttggtagtgttggtttgaactttaaacagcttattggctatgtgtttgcaccaatcgcattcttaatggggattccatggagcgaagctgttccagctggctctttaatggcgactaaattaattacaaatgagtttgtagcaatgcttgattttaaaaatgtcctgggtgatgtatctgctcgaacacaaggtatcatttcagtttacttagtaagcttcgctaattttggtacggttggtatcatcgtaggttcaattaaaggcattagtgataaacaaggagaaaaagttgcatcctttgcaatgaggctgttacttggttcaactctagcttcaatcatttcaggatcaatcattggcctagtattgtaaattaatcgaagtatctaaattaaatttataacaacatcaaaaccccatcaccaagttggcgcaacagcgcatcataacttagtgatggggttttatcataacaatctactttttcgtagccgtttttgaaatgtatgttgatggtttatctttttcaaaaattgttaatcccgttatatcttttttatgttttgaagggacaatgaagctaagtatataagcaaagacaaaagcaactgtaaatgaaatggtagatacatagaaaggtgagttacctttgccaacaccattatagacataagcaaagatgatacccaatattaatccacaaataacaccgaatgtgttcgtacgtttagtgaaaataccaactgcaaatacaccagccaatggaacgccgaataatccagttacaaacaagaataaatcccataagtcatttgaattagaagcaattaagtatagtgacattccaaaaccgaaaatacctgcaatgataataatgaaacgcgcaaagttaacttcgtgtcgctcgctaccttttccgaagaagcgttgcttaatgtcgattgaaatacaagcagatatagaatttaaactagatgaaatggtagactgtgtagctgcgaaaatggcagcaataagtaatcctgctacaaatggtggcatctcagtcaaaatgaaatatggcactacagatgatgtattgaagccttttggtaaaacagcttcatgtgcataaaatgaatacaacattgtacccataccataaaataaaggtgctgaaattaaagctaggataccatttgtccataacgatttatttgtttcttttaaactatcagaagcttgataacgctgcacgacgtcttgactcgccgtgtattgatacaaattgttgaaaatatttcctaggaaaataattggaatggcagctgctgcagtattcagtttccaattgtctgcactaattaattttttgtgctcaatcgcatctgcaaagacagtgccaaaaccgccattaatgttcataacacctagaataatgataactaaagcgccgcctaataaaatgacgccttgaatgaaatcactccaaaccacaccttcgaatccacctaaaaatgtatataaaatacatagtaaaccaacgagtgatgcaacgatataaggattcatgtctgatacagatgtaatcgctaatgttggtaagtagataacgattgctacacgccctagatgataaactacaaatagtaaagagccaatgacacgaatgctaggtccgaaacgtgcttctagatattcatatgcagatgttacctttaactttttaaagaatggaacatagaaataaatgagtaatggaataattgctacgatagcgatgttacctgcaatatatgaccaatctgttaaaaatgctttctctggtgtagacataaacgtaattgcacttaatgtagttgcataaattgaaaacccaactacccaagatggcaagcgaccacttgcggtaaagaaactattcgtactttggctcgcgcgcttggtaaaataaacgccaatgaacaacatagctagtagataaatgataacggcaacccagttcagtgtgccaaatccaacttctttcatggacaacatcccctttacaatgtattgattctttgatgtctataaatcgtattttgcaatgagttgatctaatgtttgtcgatgtgcttcgttaaaaggtttgaatggacgtttcggtaatcctgcatcaatgccacgatgacgtaatatttctttcaatgttggataaatccccattgataacactgtttcgataatgtcgtttgaatcatgttgtagttggtaagcttcttgaatttgaccttgtcttgctaagtcgaagatttttctagcgcggcgaccattaacgttatatgtagaaccaattgcaccatctacgccagaaatcgtagcttgaactaacatttcatcaaagccagataagattaatttgtctgggaatgcttttctaatacgttcgagtaggaagaagttcggcgctgtatatttaacaccaacaattttttcgtgattaaatagctcgctgaattgttcaatagaaatattcacacctgttaaatctggtattgcataaataatcatattgttctgtgttgcttcgataatatcgaaatagtaatctctaatttcttcaaaagtaaatggatagtagaatggtgttacggcagaaagtgcatcataaccgagttctgtggcatattttccaagttcaatggcttcatttaaatctaacgaacctacttgagcaatcaatttcaccttatccccaactgcctctttggcaaccttgaaaacttgcttcttctgctctgtatttaataaaaagttttcgcctgagctgccatttacataaagaccgtctaattcttcagtttcaatggcattttgagcaatttgtttaagtccttgttcatttacttgaccattttcatcaaaaggaacgagtaacgctgcatataaaccttttaaatctttgttcattatgaagtccctccaaaaaatcatttgataatatagtttacagctataattgtaaacgctatcataaaatgtaacaatatctttttgaaaattgtagtcatatttatgtataattaatgaaaatatttttcaaaatcaatagaaatggagtgagtaaggtgtattacatcgcaatcgatattggaggcactcaaattaaatcggcagttattgataagcaattgaatatgtttgactatcaacaaataccaacgccggacaataaaagtgagcttattactgacaaagtatatgagattgtaacaggatatatgaagcaatatcatttgatccaacctgtcataggtatttcatcagcaggcgttgttgatgaacaaaaaggcgaaattgtatacgcagggccaaccattccgaattataaaggtactaattttaagcgattattaaaatccctgtctccttatgtcaaagtaaaaaatgatgtaaacgctgcattactaggcgaattgaaattacatcaatatcaagcagaacggatcttttgtatgacgcttggtacaggcattgggggtgcgtacaaaaataatcaaggccatattgataatggtgaacttcataaggcaaatgaagttgggtatttattgtatcgtccaactgaaaatacaacgtttgagcaacgtgctgcaacgagtgcattgaaaaagcgcatgattgacggaggatttacgagaagcacacatgtgccagtattgtttgaagcagctgaagaaggtgatgatattgcaaaacaaatattgaatgagtgggcagaagatgtagcagaagggattgcccaaatacaagtcatgtatgatccaggtcttatattaattggtggcggtatatctgaacaaggagacaatctcattaaatatatcgagccgaaagttgcacactatttaccaaaagactatgtttatgcaccgatacaaacgactaagagtaaaaatgatgcagcattatatggctgtttgcaatgatggttgaaagaaggagtcattctaaaatagaatttgaaaccgataagagagatgagagctgttgttagttccacacatcacactctatctaggaccaatctaaactatatcaaccaacagtgtgacacgggcatattaaattgaagacgcttgaaagtatagttctcaaaaatgtaaaaaagtatttggcattgaaattaaaaaagcacctagcaacttgttgggacaatcacgatgattgtttacagttgcaggtggatttgaatatactactagttatttgttgtctaggataatagatttagtatgttgataagtttgactcagatttgtattttctaataaatgataactcacgatatcgattaaaaagagtgtcgcaatttgtgtgttgataaattgatggtcggtattacgcgattgatccgttgttaaaagtactaaatctgcacaatctgtaagtttactaccttcgaaatttgtgatggcaacgacatatgcaccatgagatttggcgacttccgctgctgaaattaattccgaagtattaccactatttgacatagcaataaacatgtccgaatgagatagtagagatgccgatattttcattaaatgtgaatcggtagtaacattaccttttagccccatacgaatcatacgataataaaattcagtcgctgataaaccagagctacctagtccagcaaagagtatatgtcgacttgattgaagtttgtcgataaaggtttggataatgtcgttatcaataaattcaccagtttgttgaatgatttgttgatgatatttatgaattctttgaatgattgggctattttcaataactgtctctgtcatttcttgttgaatattaaattttaaatcttggaaattctcataatccagcttatgactaaagcgtgtcatcgttgctggtgatgtaccaatcgcatgggctaaggagttaatcgttgaaaaggcatcgctataaccattttgtcttatataattgacgatgcgtttatcagtttttgtaaataaatgttgataacgttgaacacgattctcaaatttcattgtgtcaccccttcatcttaatgattactattatatatgaaaaatattttcaagatagtaaaaagcattgataaaaattatcttaatgatatattgtaaatgactttacgtgaaaaaacgacttatggagtgaggaataatgttaccacatggattaatagtatcttgtcaggcactaccagatgaaccattacattcatcttttattatgtcgaaaatggcattagctgcgtatgaaggtggtgctgttggtattcgcgcaaatactaaggaagacattttagcaattaaagaaacggtagatttaccagttattggcattgtgaaacgtgactatgatcactcagatgttttcattactgcaacgtcaaaagaagttgatgaactgatagaaagccaatgtgaagtcattgcattggatgcaacgttacagcaacgtccgaaagaaacgttagacgaattagtgacatatattagaacacatgcacctaacgttgaaatcatggctgatatcgcgaccgttgaagaagctaaaaatgcggcacgacttggctttgattatattggcacgacgttacatggttatactagttatacgcaaggacaattactttatcaaaatgacttccaatttctaaaagatgtactacaaagtgttgatgcaaaagttattgcggaaggtaatgtcattacaccggatatgtataaacgcgtgatggacttaggcgttcattgttcagtcgttggtggtgcgataacacgaccaaaagaaattacgaaacgttttgttcaagttatggaagattaaatgataacgataaaaaacgagatgaccatcattaattaaaggtacctaattatcttaggtggctgaatgaatgtaatgggttcatctcgttttgtttgtttatgatagtgattttattttcaatttgaattatccaaaaataagtaaagcgacggggatggtgattaatagcgacaatgccacgcgtaaaaaccaaatgatgatgagtttccagacaggtattttaatttcagttgctagtatacatggcactaatgctgagaaaaagataatggctgatacgcttactacaccgacgacaaatttagtactcattgcagctttagttactaacaaagatggtaaaaacatttctacaatagaaatcgctgaagcttttgcaagtacagcctgatcagcaattgggaaaatataaataaatggatagaatatatagccaagccaatcaatgaatggtgtatagttcgctacaatcagtcctaaaaaaccaatcgataatatagaaggcaaaataccaacagtcatttctaaaccgtctttcaaattgtcccaaacgttcttcacgagggaaggtgttaatgcattttgtttcatcgcctctgcatatgcagttttcagtctgcttccttcaatagcaacttcttgttctccttcttgtccgttataatattctgttgattcattggtgattggcggtagccatgcagtaattgcagtcacgacaaatgtgatgactaaagttatccaaaagtataaattccaatgcggcattaatcctaaagttttagcaacgataatcataaaagttgctgaaactgttgaaaagccagtcgtaataatcgtggcttctcgtttgttgtacatcccttgcttatagacacgattagtaatcaataatcctaaggaataactgccgacaaacgaagccactgcatcgacagcggattttcctggtgttttaaaaataggtctcataataggctccatataaacaccgacaaattctaataagccatagcctactaataaagaaagcgcaattgcacctactggaattaagatacttaatggcatcattaatttttcaaacaaaaacggaccatagttagctttaaatagtattgatggaccgattttaaatacatacattataccgattattgcacctgcaactttaaataatgtaatgaccaagtttgtgattgaagtcataaaagtacgtctcactattggtaacgctgtaccaattaaaatcataatcagtgcaacatagggcataagtggacctatgattgagcgaatggctagatgaacatgatcgacgaaaatagtgttgttaccattaatcgtaaaaggaataaagaaacatagtatgcccactaaactatagacaaaaaaacgccatgcacttggttgttgtgcattagaatgatattgattcattaaagcaacccctttgtttaaatgaatacacaaaactgtatgatgcatcttccccttaatgagatgaatcattgttttaatttagaaaaatctgaaaacttactataattgtatagtttgaattattttcataccaatacaaattaactaattatatatagattgaaactatattacttaataaaatatttatcttaaatgttgttgtgttgattcaacgccacaattaaaagtgattacaaattatttgaggatacagatatttgtaaatgattagtatcgatttaatatcgtattattaaatttttattaattttgtagtcttaatcaaaaaataatatatgtcatgttatattgaaggtgcagttgtttttcattctcaagagggggtcaaaaaaatacttttgaggtgattatatgttaagaggacaagaagaaagaaagtatagtattagaaagtattcaataggcgtggtgtcagtgttagcggctacaatgtttgttgtgacatcacatgaagcacaagcctcggaaaaaacaccaacgactaatgcagcggcacaaaaagaaacactaaatcaaccgggagaacaagggaatgccataacgtcacatcaaatgcagtcaggaaagcaattagacgatatgcataaagagaatggtaaaagtggaacagtgacagaaggtaaagatacgcttcaatcatcgaagcatcaatcaacacaaaatagtaaaacaatcagaacgcaaaatgataatcaagtaaagcaagattctgaacgacaaggttctagacagtcacaccaaaataacgcgattaacaaaactgaacgccaaaatgaccaggttcaaaacacccatcatgctgaacgtaatggatcacaatcgacaacgtcacaatcgaatgatgttgataaatcacaaccatccattccggcacaaaaggtaataccaaatcatgataaagcagcaccaacttcaacaacacccccatctaatgataaaactgcacctaaatcaacaaaaacacaagatgcaaccacggacaagcatccaaatcaacaagatacacatcaacccgcgcatcaaatcatagatgcaaagcaagatgatactgttcgccaaagtgaacagaaaccacaagttggcgatttaagtaaacatatcgatggtcaaaattccccagagaaaccgacagataaaaatactgataataaacaactaatcaaagatgcgcttcaagcgcctaaaacacgttcgactacaaatgcagcagcagatgctaaaaaggttcgaccacttaaagcgaatcaagtacaaccacttaacaaatatccagttgtttttgtacatggatttttaggattagtaggcgataatgcacctgctttatacccaaattattggggtgggaataaatttaaagttatcgaagaattgagaaagcaaggctataatgtacatcaagcaagtgttagtgcatttggtagcaactatgatcgtgctgtagaactttattattacatcaaaggtggtcgcgtagattatggtgcagcacatgcagctaaatacggacatgagcgctatggtaagacatataaaggaatcatgcctaattgggaacctggtaaaaaggtacatcttgtagggcatagtatgggtggtcaaacaattcgtttaatggaagagtttttaagaaatggtaacaaagaagaaattgcctatcataaagcgcatggtggagaaatatcaccattattcactggtggtcatgacaatatggttgcatcaatcacaacattagcaacaccacataatggttcacaagcagctgataagtttggaaatacagaagctgttagaaaaatcatgttcgctttaaatcgatttatgggtaacaagtattcgaatatcgatttaggattaacgcaatggggctttaaacaattaccaaatgagagttacattgactatataaaacgcgttagtaaaagcaaaatttggacatcagacgacaatgctgcctatgatttaacgttagatggctctgcaaaattgaacaacatgacaagtatgaatccaaatattacgtacacgacttatacaggtgtatcatctcatactggtccattaggttatgaaaatcctgatttaggtacatttttcttaatggatacaacgagtagaattattggtcatgatgcaagagaagaatggcgtaaaaatgatggtgtcgtgccagtgatttcgtcattacatccgtccaatcaaccatttgttaatgttacgaatgatgaacctgccacacgaagaggtatctggcaagttaaaccaatcatacaaggatgggattgtcttgtgctcaaaaccttttaatgtcagtgattacaaggggtttgtagcatcttcaaaaatgaaaaagggcaaaaaaagggcagatgctttttagtacacaagtttttctaatttttgctctaactctctgtccattttctctgttacatgggtgtatacctttatagtcgttttttcatctgtatgtcctactcttttcataattgcttttaacgatatattcatttccgccaataaacttatgtgtgtatgccttagtgtgtgagtagtaacttttttatttatatttaatgattctgcagctgaggacaatcgtttgtttatcctactgccttgcataggatttccttgacaagttgtgaatataaaccctctatcaacatagtttggttcccattgttgcatctttttattttctaacattatttttttcaatacatttgctatccttgaattgatggcgatttttctttttgaacctgcggtcttcgtagtatctttgtgaccaaatccagcattacatttgattctgtgaatagtgccattaatatcgatcgttttatttttgaggtcaacatctttaacttggagcgctaataactcacctatgcgcatacctgttaaagcttgaacttctacagccccagcaactaaaatacgagctctatactgcatgttactatcgttcagtataaaatcgcgtatctgtattacctgttccatctctaaatagttatacattttcgcttcttctttttctatatcttctattgtcttactcttctttggtagtgtgacgctatttaatatgtgttcgtttggataattgtaaaatttaacggcgtatttaatagcttctttcatatgtccaagttgacgctttacctgatttgcagaatatacgtttgataattcgttaataaatgtttgcatgtactttgtatcaattttgtttaaaagtaaattttgagaactgttctttttgatgtttttgattcttgttttcaaattgtcaagcgtcgttactttaaagccagatgtttttgtatgatattcaagccattcatctaatagtgaatgaaaagtcaaagtttttaattcgtttgacgacttgtcgtgtagtttttcttttatcttttcttctaaacgaaacattgcttctttttgtgcttgttttgtattcttgttcaatacaacgcttacacgtttccatttatctgtgtatggatctttgtacttctcgtagtatctgtaactagtttcgttgtttttgtttttaaatttttcaatccacatttttagattcctcctcaaaattggcaaaaaataataagggtaggcgggctacccgataaatataaaaaaggtaatgtggaaaaatatttatatacatttctattagaaaatatagaaaagaacaataaagttatttagaaaatgtattaaaattggcacttcaatccttttagtaataaggtatgaaacggataggattactccaaaataaaaataaggaatataatccaatactgtgctgccatcgtgtaatattgcaaaaagaaaacttgatacaagggtgcctataaacaagtgcttcctaaaaaagactctaagtaaaaaaactctaaatattagttcttctgctatagcagggactattgcaatacttatagccagaagtaaaaaaggtgtaccagaaaagtgttgtattattgactcatcatttggtgaaacagcagattgccaaaaagataaggtataatctaaaaccagtattaaaacaagagacataaaaataatcagaatttctttgtaattaattaattttagattgaaaaaattaaattttagcaatttagaaaagaacagacaaagacaaagtaaagacaagcttataaatccatattgccaacctttagtaacataatcgctagaaaaaagggctataaagaaaaggacgataagcaaaagtgatttcaaaatagctttgaaataattttgattgttgacactgagatcgtcgtgaaatatattttttaagtaattcataaaattactcctttctttttttataaatttatcttactatattatgaaatatttaaccactaactattatatagatacatattagtatttcattcatagcaatgttcttcagcagccctagtgtgaatttattctatttaagctaataagcatttgctcgctcaatgtgatgcaatttaaaaactcttaatggctcaaatgtgattgagtattcgccgtagtgagttccaacaccgtatatcttcttatattgttctatcgcttccaatatgtattcttcgcttaattgtagatactcagacaattcatacaagttacgtacgccataattataagcttctacaatttcgcgtaatggaacagctgagataaagccgtgtcgtcttgcgtaattttcgaacttgcgattgtttaattttgatttttcctttgcttgctttttatactaatccttcttttatatactatcttattagttaatattggctcctggtactgcgctagcaccagctcttgcttcctcttcttttccttttttgtactcttcaaaagctttagcctgttcatctttagtccagccaggcgaaacgacatactcatcatttaaattagtattttgtgaatcgttttcatttatatttgcaggagtattattagatggatctgaattattattaagttgattgttttgtgattggttttgattgtttgaattattttgtatgctattattaggtggatttttatcttcaacttttttcgttttttctttttgcttttttggtttgctatctttatgtttttgtgtatgagactttttattttcttctttttttggtttatctttttcaccacaagctgttaaagctaatgtacttactagtagcagtccgattacttttttcatatgtatctctcctttgtttatatttccttatatttaaaaactctcaacggctcaaacgtaatagaatactcgccatagtgagttccaataccatatatctttttatattgttctatagcttctagtatgtatgattcactcaactgcagatactctgacaactcgtacaaattacgaacaccgtagttgtgagcttctacaatttcatgtagcggtacagctgaagtaaaaccatgtctacgtgcataattttcaaattttctattaatccattttgattggtctaaaatgttgccatacgtcaacttgtggtgggcaagttcctcatataacacttctgctttacgtacttctgataaattacgccttatataaatttttccgttcatatagcatccaggttggaaatttggaagctggtcagtttcttctatctttattttttcgttatttatgcaaagttcttcgtataatcccaatataaacaccctttatttgtctctatttctaacccattcaatgaatctatttacttcttcaatctcttcttcagttaatccctccttatcaaaatgagcagcaattgtttcttgatgtatatctttttttgattcagtaattcttgatttcggtacattgaagtaatctgcaagttgttgaattcttttaattcgtggatatttagtttgttgaatccaattggagactgtaggttgagaaactccaatagcttcagcaagttctctctgatcaatatttttatcattcataagttcttgaaggttttcggataaaatttttctgactttattattctccatagttgtctcctttaatattacttaatgtaatattaacttaccataaccgacattactttacaatactttttataactttttatgaagaaatataactttatctgttgacaagtaatacaaagtaatataaagttatacgtgtgaaagggaggtggacgacatgccggaacaattatccgtaagaaaatggagacttgtaagggacttgaaacagcaagaagtagcagatatattgggcgtcaatgcaaagacagttggtcattgggaaaaggatgacactaatttaagtaatgttacagtttacgctttagcaaagttatatgatattgaggtagaccagataaaggtctaaattttttgaccttcgtataactttttataacttttgggtaatgtaacaaatggacataaacaaacaacttaataggaggaacaacaaatgaacgaagaaaaattaaagatgattctcttacttcttgaagatataccaagagacgaatggaatcggttagtaaatgaagtaaataatcaatacagttaccaagctgacaaggtaggacttgccagtgataactgtcaacaaatagcaaataactataagcactatggattttaagatggataaggactatcgttattcttttcagctttaacgttaatgtcgaaatacaaaacatgatctaagctgacaactctatcttttggataaatgatgtgtagagttttgctttcagcatctttcatatgttcttgtactttaataacttcaccattaattaaatgtaaatctaaagaagtaacgatttctttatctaaatattgagtgagcaatctcttatgcatacttatcacctccttaggttgataacaacattatacacgaaaggagcataaacattatgcaagcattacaaacaaaatcgaacatcggcgaaatgttcaacatacaagagaaagaaaatggagaaatcgcaatcagcggtcgagaacttcatcaagcattagaagttaagacggcatataaagattggtttccaagaatgcttaaatacggatttgaagaaaatacagattacacagctatcgctcaaaaaagagcaacagctcaaggcaatatgactcactatattgatcacgcactcacactagacactgcaaaagaaatcgcaatgattcaacgtagtgaaccgggtaaacgtgcaagacaatacttcatccaagtggaaaaagcatggaacagtccagaaatgattatgcaacgtgctttaaaaattgctaacaacacaatcaatcaattagaaacaaagattgaacgcgacaaaccaaaaattgtatttgcagatgcagtagctactactaagacatcaattttagttggagagttagcaaagatcattaaacaaaacggtgtaaacatcgggcaacgcagattgtttgaatggttacgtcaaaacggattccttattaaacgcaagggtgtggattataacatgcctacacagtattcaatggaacgtgagttattcgaaattaaagaaacatcaatcacacattcggacggtcacacatcaattagtaagacgccaaaagtaacaggcaaaggacaacaatactttgttaacaagtttttaggagaaaaacaaacaacttaataggaggaacgaacaatgcgagctcaaaacaaaaaagtcatctattactactatgacgaagaaggtaatagacgaccaatagatattcaaattaatgacggatatgaactgatggttcgatctcatttcatcaacgataccattgaagaaataccatacttaaataataacttatatgccttggttgatggttatgaatttaagttagattgaatttttgagaaagatattggcaaccttcagccgatgacctcatggcaaatgattgggaagttataaacccaattagagaccaggaattattgcaggttaatttaaccgaacctaactttaacatttatcgaaaggagtgctaaaaatgcccaaaatcataacaccaccaacgccagaaaacacatatcgaggcgaagaaaaatttgtaaaaaagttatacgcaacacctacacaaatccatcaattatttggagtaagtagaagtacagtatacaactggttgaaatattaccgcaaagataatttaggtgtagaaaatttatatattgattattcagcgacaggcacattgattaatatttctaaattagaagagtatttgatcagaaagcataaaaaatggtattaggaggattatcaaatgagtgacacatataaaagctatctaatagcagtactgtgctttacagtcttagcgattgtactcatgccgtttctatacttcactacagcgtggtcaattgcgggattcgcaagtatcgcaacattcatattctataaagaatacttttatgaagaataaaaaaactgctactcagagcaatgagtaacagtgtcaaacatatctaataaagaaataaaaaatatgttttcaatataaaacgaaacatggaggaagtcaaccatgactaaaaactataaagacatgacgcaggaagaaataagaggcttattatctgaaaaaagcggagaattgtatgaattagcgaaagaaattaagggagaaagcaaatttgatattttgtttttctcagcaataggagttagcgacggagatttcataaaaagttcaagttctgcacttggcaatgcttttaatcttgctgaattattggataatgctactgatttcaacgatgccattaacgccattcaaaaacgtaaactacaaaaatttcttgctatagataacgacaaggaggactaaaacaatgtattacaaaatgggtgagataaaaaacaaaattataaactttaacgggttcgaatttaaagtgtctgcgatgaagaaacatgacggtatcagtatacaagttaaggatatgaataatgttccacttaaatcatttcatgtcgtagatttaagcgaactatatattgcaatggatgcaatgcatgacgttgtaaacgaatggattaaagaaaatacagatgattacgacagactaattaacttagtcatgagatggtaggaggtcgctatgaagcagactgtaacttatctaatcaagcataaagatgaaaatctatttattacaaaccgaccaaccgaagtgaacgacacagtgaagtattcaactgatatgcgagacgcaagagaattcgacgggctagacaaaactgttattgatatgtctaagcacaaagcaatcaagaaaacagtgacagaaacaattgagtacgaggaggtagaacatgactgagcaaacattattcgaacagttgaacagtaaaaatgtgaacgatcatacagaacaaaaaaatggattaacttatctagcgtggtcatatgcacatcaagagttaaaaaagattgaccctaactatacagtaagagtgcacgagtttccacatccagatattaacacagaaaattattttgtaccttatttagctacaccagagggctattttgtacaggtatctgtgactgtgaaagatagtacagagactgagtggctcccagtattggactttagaaataaatcgcttgctaaaggtagtgcaacaacttttgatatcaacaaagcacaaaaacgatgtttcgttaaagcttcggctttacacggtttaggcttatatatttacaacggcgaggaactgccaagtgcaagtgacaacgatattacagaattagaagagcgtatcaatcagtttgtgaacttatctcaagaaaaagggcgagatgcaactatcgacaaaacgatgagatggctaaaaatatctaacattaataaattaagtcaaaaacaaatcgcagaagcacaccaaaaattagatgcgggattaaaacaattggatagtgaggagaaacaataatgttaaacagagtagttttagtaggacgattaacaaaagacccagaattaagaagtacaccaaatggcgtaaatgtagggacattcacattagcagtaaacagaacatttacgaatgctcaaggcgagcgtgaagcagattttataaacgtagtagtgttcaaaaaacaagctgaaaacgttaaaaactacctttctaaaggatcgttggcaggtgtagacggacgactacaaacacgcagttacgataacaaagaagggcgacgtgtatttgtgacagaagtagtagcggacagcgttcaattcttagaaccgaagaataacaacaaacagaataaccaacaacacaacggacaaactcaaactggtaataatccgttcgacaataccgaagaagacttttctgacttaccgttctgattggaatgattaaatgccaaaaattactagttatatcactcaagacgacggcacaacaacagttgtcatctcgggtgtcgaattaggcaataaagaaacattactacttgataacggttttgatgtagaagtcgatgtaagcgtcatagatccgtttcgaattaccggcaagcaacgacgaaaaatattcgcgcttgtcaaagacatagaagaacatacaggtcaaccaatggactatatgcgacatatgttcatcgagtttgtaagaatgtactacggctatgatgaacgtatttcgcttagtaattgtacaagaacgcaagcaagccaaatcatcgaagtaacgcttgactggacgttccacaatgacataccccttagctacaaaacgagtgacttacttaaacaagacaaagcgtacttatactggtcgacagttaatcgtcattgcattatatgccaaaaacctcacgctgacctagcgcattatgaaacagtcggcagaggcatgaacagaaacaagatgaatcactatgacaaacatgtattagcgttatgtcgcgaacatcacaacgagcaacatgcgatgggcgttaagtcgtttgatgataaatatcacttgcatgactcgtggctaaaagttgatgagaggctcaacaaaatgttgaaaggagaaaacaatgggagaagtatcgtggataaaacttaaagttggcatgtttgatgacagcaaaatcaaatatatcgaagctttacccgaaagagatacgatcataactatttgggttaagttgctaactttatcaggaaaatacaacgaacaaggttacattatgctatccgaaaacttgccgtataacgaagaaatgttagcaaatgaatttaatagacccattaactcaataaggttagcaattcaaacttttgagacattgggcatgattgaaaaagttaatggtgtcataaaagtgacaaactgggagaagcatcaaagcttagatagcaaagctaagcataaagaaaaaaataaattgcgacaacaacgctatcgagagagacaaaaaaagttactagaagaaaaaagtaacgttaccgtaacgtcacgtaacgatacagaagaagaaagagaagaagaaaaagaagaagaatataagaataaagaagaagaaagagaagccgtcttctcatcttcaataaaatatataattgcaaatttagatgataagttaacgcctaatcaaatggaacaattagggtttgctattgatgatataggtacgaacgcttttgaagttgtaaaagtaggtgttgagtacactaaaagcaaaagtgcgcatggtggctacttaattaaagttttgaacaactgggctaaagagaatgtcaaaacaaaagaagatgcagaacacaaaatagcgcctaggaaaaacgcaactgatgatgtcattgcacaaatggaaaaagaattgagtgatgactaatgccgatgagcaaaacacaagcattagaaattattaaaaaagttaggtacgtatacaacattgattttgataaaccaaagttagaaatgtggattgatgtattaagtcaaaacggagattatcaaccaactgtaaaagcagtagatggatatatcaacagtaacaacccgtacccgcctaacctaccagcaatcatgcgtaaggcacctaaaaaagtatctatcgagccggtagacaacgaaactgctacacaccaatggaaaatgcagaatgaccccgaatatgtcagacaaagaaaaatagcgctagataacttcatgaataagttggcagaatttgggggcgataacgaatgaattacggacaatttgagattgaaagtacaataatcgctacgctacttaaacaaccggacgtactagaaaaaataagagttaaagattacatgtttacgaacgaaaagtttaaaacctttttcaattatgtaatggactctggaaagatagaccatcaagaaatttatttaaaagcaactaaagataaagaatttttagatgcagatactataactaaactttacaactccgatttcattgggtacggcttctttgaacgttaccaacaagaattattggaaagttatcaactcaacaaagcaaacgaattggtaactgagttcaaacaacaacctacgaaccaaaattttaacaacttgattgatgaactcaaggatttaaaaacaattactaacaaaaaagaagatggaaccaagaagtttgttgaggagtttgtcgacgagttatacagcgatagccctaagaagcaaattaagacgggttataaactcatggattacaaaatagggggattggagccatcacaattaatcgtcatcgcagcgcgtccctcagtgggtaagacaggttttgcattaaacatgatgctgaacatagcacaaaatggatataaaacatctttctttagtcttgaaacaactggcacatcagtattgaaacgtatgttatcaacaattactggtattgagttaaccaagataaaagaaatcaggaacttaacaccggatgacttaacgaagttaacgaatgcaatggatcaaattatgaagttaggtattgatatttctgataaaagtaatatcacaccgcaagatgtgcgagcacaagcaatgagttattcagacaggcaacaagttatttttatagattatctccaactgatggatactgatgcgaaagttgatagacgtgtagcagtagaaaagatatcacgtgacttaaagataatcgctaacgagacaggcgcaatcatcgtactactttcacaactgaatcgtggtgtcgagtctagacaggataaacgaccaatgctatcggacatgaaagaatcaggtggaatagaagccgatgcaagtttggcaatgctactttaccgtgatgattactataaccgtgaagaagatgacagtatcacaggcaaatctattgttgaatgtaacatagccaaaaacaaagacggcgaaaccggaataattgaatttgagtattacaagaagacacagaggtttttcacatgaacatcatgcaattcaaaagcttattgaaatcgatgtatgaagagacaaagcaaaacgacccgattgtagcaaatgtctatatagaaactggttgggcagttaacagattgttagacaataacgagttatctccttttgatgattatgacaaagttgaagaaaagatcatgaatgaaatcaactggaagaaaacgaatattaaggagtgttaaaaatgccgaaagaaaaatattacttataccgagaagatggcacggaagatattaaggttatcaagtataaagataacgtaaatgaagtttattcgctcacaggagcccatttcagcgacgaaaagaaaattatgactgatagtgacctaaaacgattcaaaggcgctcacggacttctatatgagcaagagctaggattacaagcgacgatatttgatatttagaggtggcacatggaaatagaaattaaatttaacgaaacgtttgaggcacctatgggctcgcctcgtccacgctttcgtaatacaggaagatttgttcaaacttacatgcctacgtcttatacaaagcataaagcatatatacaagggcaaatacctaagttgaatctagagcgcgcactaaaaatcgaattagacttttactttccattgcttaaatcatggtcaaagaaaaagaaaagcgaaatggttgggcagtataaagtgactaagccggatatcgataacttaattaaaacggtattagatgcttgtaatggtcatgtatggaaagatgataaccaaattacagaaataactagctcaaagcgttatggactagaaccaaaaataatcatgcgagttgaggaagtgatctaatgcaacaacaagcatatataaacgcaacgattgatataagggtacttacggaagttgaatatcagcattttgatgatgtggataaagaaaaagatgcactggcaaagcgcttagatgacaatccggacgaattactaaagtatgacaacataacaataagacatgcatatatagaggtggaataaatgaagctgaacgaagtattcgcaactaatttaagagtaatcatggctagagataacgtaagtgttcaagatttgcacaacgaaactggcgtatcaagatcaactattagtggatataaaaacggaaaagctgagatggttaacttaaatgtattagataaattggcagatgctctaggtgttaatgtaagtgaactatttactagaaatcataacacacacaaattagaggattggattaaaacagtaaatgtatagaggtggaataaatggcgaaaacagcaagaattgtaaggatacatgataaaccgtataggttcagtgaatttgaaatggagttaattgaaagtcacggtataacacccgggatggtttctaaaagagtaaaagacggttgggaactacatgaagcaatggacgcagcagaaggcatgcgtttaagcgagtacagagaaaagaaaacaatagaaagactggaacaagctagactcgaacgcaaattggaaagacagcgaaagaaagaggctgagctaagaagaaagaagccacacttgtttaatgtaccacagaaacattcacgcgatccgtactggtttgataatacttataaccaaatgttcaagaagtggcaggaagtataaatgcctaaaatcgatagcgcatgtaaagaatacttaaaccgatttttcggatctaagagatatctgtatcaggataacgaacgagtggcacatatccatgtagtgaatggcacttattactttcacgggcatatcgtgccaggttggcaaggtgtgaaaaagatgtttgatacagccgaagagcttgaaacatatataaagcaacatggtttggaatacgagaaacagaagcaactaactttattttaaggagttggaaatgatgaaaatcaaaattgaaaaagaagtgaacttgcctgaacttatccaatggccttgggataaccccaaattatcaggaaataaaagattctatccaaatggtgttaggcacaactgtcatgtaacttttgatgttgatagcatcttatgtaatgtgactggatatgtatcaattaacgataaattcactattcaagaggagatataacaatgaaaatcaaagtaaaaaaagaaatgaatttacctgaacttatccaatgggcttggaagaatcctgagctaacaacaggaaagaggttttgcacagaaaacaaagataatgaaaaatttatttatttttcttgggaggatggaagaaagtgttttactagttattttataacacctgaagatacttttgtagtcgaagttgaagaggaaatcacgggagatacagtatttgataggttgtttgaagtgtacgagatctcagaaggagaatataatcctacatcaaataggaatactagtataaacgaaagtttaaatgacgacagatgtttccctatcaaagcattctacatcttaaacgacgacctaactatgacgttaatctggaaagatggggagttgattaaataatggaacatggttcaaaagaatattacgaaaagcaaagtgaatactggtttgatgaagcaagcaagtttttgaagcaacgtgatgagcttattggggatatagcgaagttacgagaacacaacaaagagctggagaagaaagcgatcgcatgggataggtattgcaagagtgttgaaaaagatttaataaacgaattcggcaacgatgatgaaagagttaaatttggaatggaattaaacaataaaatttttgtggaggaagacactaatgaataaccgtgaacaaatagaacaatcagtgatcagtgctagtgcgtataacggcaatgacacagaggggttactaaaagagattgaggacgtgtataagaaagcacaagcgtttgatgaaatacttgagggaatgacaaatgctattcaacattcagttaaagaaggtattgaacttgatgaagcagtagggattatggcaggtcaagtggtctataaatatgaggaggagcaggaaaatgactaacacattaacaactgatcagttacaagagttattacaaatacaaaaggagttcgacgatagaataccaaccagaaatttaaatgacacagtagctagtatgattattgaatttgtagagtggattaacacgcttgagttttttaaaaattggaagaaacaaccaggtaagccactagatacacaattagatgagattgctgattacttagctttcagtttgcaattaactctgactattgttgatgaagaagatttggaagaaactactaaggttatggttgatttgattgaaaatgaagttactttacctaaactacattcagtttattttgttcatgtaatgcatacactaacggaacaatttgtaaaaggtattgataatagtattgtacaagttttaataatgccttttttgtacgccaatacttactattcaatcgaccaacttatcgacgcatacaaaaagaaaatgaaaaggaaccacgaaagacaagatggaacagcagacgcaggaaaaggatacgtgtaaagacatcttagatcgagtcaaggaggttttggggaagtgactataaacaaattaaaaaatatgctcacgaatattggtttgaatgtagaaagtgagaagttatccaaagttgaagtccagttatttccgacagaccaaccattaaaagataatacagtgcttgaaggctattcttgcaatattaagaattggcctaagttcaaaatttggataaacaaatctaacaaagtaactataaaatcacgtggagttcaaaagagttttgatatagaagatgagaagtcattaaggaaagaattaaaaggttttgaaattttgtaaaagaggtgctgaggaagtgacagggtacattatagcaatgttatttttcatgagtttcatagggtcgattgcgagtgtgtcgatttttatagccgatttaacagttaataaacatttatctcaaaaaggattattgttctttttcttgttgggaataatattaaatattatagctattctgatttatccaatcggcgtagattatggagtgttaaagaaatgacgcaatacttagttacaacattcaaagattcaacaggacgtaaacatacacacataactcgagctaagagcaatcaaaggtttacagttgttgaggcggagagtaaagaagaagcgaaagagaagtgcgaggcacaagttaaaagagaggcagttattaaattaggtcagttgtttgaaaatataagggagtgtgggaaatgattaaacaaatatttagactattattcttactagcaatgtacgagttaggtaagtatgtaactgagcaagtatatattatgatgacagctaatgatgatgtagaggcgccaagtgactttgaaaaaatcagagctgaagtttcatggtaatagctattatcatttttgaattaattatattaatgtgtttagcaatagcactggaggtgttgtaaatatgtggattgtcatttcaattgttttatctatatttttattgatcttgttaagtagcatttctcataagatgaaaaccatagaagcattggagtatatgaatgtttatcttttcaagcagttagtaaaaaataatggtgtcgaaggtatagaagattatgaaaatgaagttgaacgaattagaaaaagactcaaaagttaaagagagcctcaaggcttctctgctctaaaacaatgaaaggagccgaacatgttagacaaagtcactcaaatagaaacaattaaatatgatcgtgatgtctcatattcttatgctgctagtcgtttatccactcattggactaatcataacatggcttggtctgactttatgcagaagctagcacaaacagttagaactaaagaagatttaactgagtacaataaaatgtctaagtctgaacaagccgatataaaagatgttggtggatttgtcggcggatatttaaaagaagggaaacggcgtgctggtcaagtcatgaatcgttcaatgctaacacttgatatcgattatgctgctcaagatatgactgacatattatctatgttttatgattttgcatattgtttgtattcaacacataagcatagagagataagtccaagactacgtttagtgattcctttaaaacgaaatgtaaatgcggatgagtatgaggctattggacgtaaagtggcagatatcgttggcatggattacttcgatgatacaacttatcaaccacataggttaatgtattggccttcaactagcaatgatgcagaatttttctttacctatgaagatttacctttgttagatccagatacaatattaaatgaatatgttgattggactgacaccttagaatggccaacgtcttcaagggaagagagtaagactaaaagattagcagataagcaaggcgacccagaagaaaagccgggaattgttggtgcattttgtagagcctatacgatagaagaagctatagaaacttttattcctgatttatacgaaaaacattctactaaccgttatacctatcatgaaggttcaactgcaggtggattggtgttatacgaaaataacaagtttgcctattctcatcataatacggatcccgtaagcggtatgcttgtgaacagttttgatttagtacgtatacacctatatggtgctcaagatgaagacactaaaacagatactccggttaatcgactacctagttataaagcaatgcagcaaagagcgcaaaatgatgaagtggttaaaaagcaattaattaacgacaaaatgactgatgcgatggaggatttcgatgaaatagaaaatagcgatgatgcatggtctgagacgttagaaattacttcgaaaggtgctttcaaagctagtattccaaatttagaaattattttgcgtaatgatccaaatttaaaaggaaaaatagcctttaatgaatttacaaaacaaattgaatgtttagggaaagtgccatggaatactaattttaagacacgtcaatggcaagacggtgatgatagcagtttaagaagttatatcgaaaagatttatgacatacatcattcaggtaaaacaaaagatgccattataagcgtagcaatacaaaatgcctatcatccagtaagagattatctaaataaaatatcgtgggatggacacaaacgtttagaacgcctattcattaaatacttaggtgttgaagacactgaagtgaatagaacaactaccaaaaaggcattgactgctggaatcgctcgagtaatggagcctggatgtaaatttgactatatgctaacgcttttcggccctcaaggtgtaggtaaatctgctttgctaaaaaaattaggtggtgcatggttttctgacagtttagtttctgttactggtaaggaagcatatgaggcattacaaggcgtttggctaatggaaatggcagaacttgcagctacaagaaaagctgaagttgaatctattaagcatttcatatctaaacaagttgaccggtttcgtgttgcttatggacattatattgaagattttccaaggcaatgtattttcattggtacaacaaataaagttgatttcttaagagatgaaactggtggaagacgtttttggccaatgactgtaaatccagagagagttgaagtgaactggtctaaactaaccaaagaagagatcgaccaaatctgggcagaagctaaatactattatgaacaaggagaagagttgttccttaaccctgaactagaagaagaaatgcggtcaatccaaagtaaacatactgaggaatctccatatacaggtattattgaggaatatcttaacacgccaattccaagcaattgggaagacttgagcatctttgaaagaaggcgattttaccaaggtgatgttgatatgttaccaacaggaaatgtagattacgttgaaagaaataaggtctgtgcgcttgaagtgtttgttgaatgttttggtaaggataagggagatagtagaggatctatggaaattagaaagatttcaaacatcttaagacaattagacaattggtctgtatatgatggtaataaaagtggggaaattcgatttggaaaagattatggtgtacagatagcttatgtaagagatgaaagtttagaagaattaatatgagaaatattgaataaatatacattttagagtattgtatcagatgttgcatcattttttgagtgatgcaacacgtgagtgtaaaaagtaaccgtaggtgttgcatcatttttagtgatgcaacattgatgcaacaaatgatacaacacctctttcccttctcgctgtagggttcaaccctgtttgtttccaatgttgcatcaaattcactataaagtttaaaaagtagtgttagggagtaaaggggtataggggtaaccctctaacagctatttttaaaagtttggcaagaattgatgcaacatcggaacacaaatataaattttgtatacaaggtgaataaatgaaagaatcgacattagaaaaatatttagtgaaagagataacaaagctaaacggtttatgtttaaaatgggttgcacctggaacaagaggtgtgccagatagaattattattatgccagaaggaaaaacatattttgtagaaatgaagcaagaaaaaggaaagttgcatcctttacaaaaatatgtgcatagacaatttgaaaatagagatcataaagtatatgtgttatggaataaagaacaagtaaatacttttatcagaatggtaggtggaacatttggcgattgacttcaaaccacataactatcaaaagtatgcaatagataaagtgatagataatgagaaatacggtctgtttttagatatgggtctagggaaaacagtatcaacacttacagcatttagtgaattgcagttgttagacactaaaaaaatgttagtcatagcacctaaacaagttgctaaagatacatgggttgatgaagttgataagtggaaccatttaaatcatctgaaagtgtctttagttttaggaacacctaaagaaagaaatgctgcattaaacacagaggctgatatctatgtaaccaataaagaaaatactaaatggttatgtgatcaatataaaaaagaatggccatttgatatggttgtaattgatgaactgtctacatttaaaagccctaagagtcaaaggtttaaatctattaaaaagaaattaccactcattaatagatttataggattaacaggaacacctagcccaaatagtttacaggatttatgggctcaagtttatttgatagacagaggagaaagacttgagtcttcattcagtcgttatcgagaaaggtactttaaaccaacacatcaagttagcgaacatgtttttaactgggagctaagagacggatctgaagaaaagatatataaacaaatagaagatatatgtttaagcatgaaagcgaaagattatctggatatgcctgacagagttgatactaaacaaacagtagtcttatctgaaaaagaaagaaaagtatatgaaaaattagaaaaaaactatattttagaatcggaagaagaaggaacagttgtagctcagaatggggcatcattaagtcaaaaactacttcaactatctaacggtgcagtttatacagatgatgaagatgtaagacttatacatgataagaagttagataagttagaggaaattatagaggagtctcaaggccaaccaatattattgttttataacttcaaacatgataaagaaagaatacttcaaaggtttaaggaagcaaccacattagaggattcaaactataaagaacgttggaatagtggagacattaagctgcttatagcacatccagcaagtgcagggcatggattaaacttacaacaaggtgggcacattattgtttggtttggacttacatggtcattggaattataccaacaagcaaatgctagattatatagacaaggacaaaatcatacgactattattcatcacatcatgaccgataacacaatagatcaaagagtatataaagctttacaaaacaaagaactaacgcaagaagaattaatgaaagctattaaagcaagaatagctaagcataagtaatggaggtctaaaatggggagcacaatatatgatatcaagccaggaacatttaaatatattgaatcagaaatatataatttaaatgagaacaagaaagaaataaaaagattgaggttggaaatacttaatccaacgaaggaacaagattccaatattgtatatggaccattacaaaaaggcgaaccagttagaacaactgaactaatggcaactagattattaactaataagatgttacgaaaccttgaagaaatggtcgaagcagttgagagtgaatacttaaagttgcctgaagatcataagaaagtaataaggctcaagtattggaataaagaaaagaagttaaagatggaacagataggacatgaatgccatatgcatcgtaatactgttactactatacgaaagaactttgttaaagcggtagcgtatcatgcaggtatcaaataacattgtgcaaagattgtgcaaaaggcctacaaatctgtagtaatatgatagtatcggaaagatgtataaagttatctaaaagttatacgacacaagtacacgaggcacatcgctatgcggtgtgtcttttgttatgcaatcaaagaggtgtaagagatgaccaagcataataacatttataagcatggtcgtaagtcatatcaatacgattggttctatcattcaaaagcatggaagaagttaagagagatagcattagatagagataattatctttgtcaaatgtgtttacgcgaagatattgtaacagatgcaaacattgtacatcacattatttatgttgatgaagattttaacaaagctttagacttagataatctaatgtcagtttgttatagctgtcataacaaaattcatgcaaatgataatgacaaaagtaatcttaagaaaattagagttctaaaaatttaaataaaaaaattatttaaataaaattttatagccccctgcccatcggcttaaaatgttttttcgccgggtaccggcgggggcccttcgcttgcaacgcggataaacttttatgaaagggggtctttatatgaaattaacaaaaaaacagctgaaagaatatatagaggattataaaaaatctgatgacatattaattaatttgtatatagaaacatatgaattttattgccgattaagagatgaacttaaaaatagtgatttgatgatagagcatacaaacaaggctggtgccagcaatattgttaagaatccattaagcatagaactgacaaaaacagttcaaacactaaataacttactcaagtctatgggtttaacagcagcacaaagaaaaaagatagttcaagaagaaggtggattcggtgactattaaagttttaaatgaaccttcaccaaaactattaacaacatggtatgcagagcaagtcactcaagggaaaataaaaacaagcaaatatgttaaaaaagaatgtgagagacaccttagatatctagaaaatgggggtaaatgggtatttgatgaagaattagcgcatcgtcctattcgatttatagaaaagttttgtaaaccttccaaaggatctaaacgtcaacttgtactacaaccatggcaacattttattattggcagtttgtttggttgggttcataaagaaacaaagctgcgcaggtttaaagaagctttgatatttatggggcgaaaaaatggtaaaacaaccactatttctggtgttgctaactatgctgtttctcaagatggagaaaatggtgcagaaattcatttgttagcgaatgtgatgaaacaagcgaggattctatttgatgaatctaaggcgatgattaaagctagcccaaagcttagagaaaattttagacctttgagagatgaaattcattacgatgcaactatatctaaaattatgccacaggcttcagacagtgataagttggatggtttaaatacacatatgggcatttttgatgaaattcatgaatttaaagattataaattgatttcagttataaaaaactcaagagcggcaaggttacaaccccttcttatctacattacgacagcggggtaccaactagatggaccacttgttaatatggtagaagcgggaagagacaccctagatcgaatcatcgaagatgaaagaactttttactatttagcttctctcgatgatgacgatgatataaatgattcgtcgaattggattaaagcaaatcctaacctaggtgtttctatcgatttagatgaaatgaaagaagagtgggaaaaggctaagagaacaccagatgaacgtggagattttataaccaaaaggtttaacatctttgctaataataatgagatgagttttattgattatccaacacttcaaaaaaataatgaaattgtttctttagaagagctggaaggcagaccgtgcacgattggttatgatttatcagaaacagaggactttacagccgcatgtgccacttttgcattagataatggcaaagttgctgtcttaacacattcttggattcctaagcataaagttgaatattctaacgaaaagataccctatagagaatgggaagaagacggattactaacaatacaagataatccttatatagactaccaagatgttttaaattggataataaagatgaatgagcattatgttgtcgaaaaaatcacttatgatagggcgaacgcattcaaactaaatcaagagttaaaaaattacggttttgaaactgaagaaacaagacaaggagctttgaccttgagccctgcattgaaggatctaaaagaaatgtttttagatgggaaaataatatttaataataatcctttaatgaaatggtatatcaataatgttcagctgaaactagacagaaatgggaactggttgccatctaaacaaagcagatatcgtaaaatagatggttttgcagcatttttaaacacatatacagatattatgaataaagttgtttctgacaaaggtgaaggaaacatagaatttattagtattaaagacataatgcgttaaggaggtgaatgttatcgcaaaagagaatattgtcacacgcataaagaaaaaattgatagacaattggattgatcagtcagcttctaagctttatgactttagcccatggaaaaataaatctttttggggtgtaatcaataatacgcttgaaactaatgaaacgatattttcagctattacaaagttatctaattcgatggctagtttgcccttgaaaatgtatgaagattataaagtagttaatacagaagtatctgatttacttacagtgtcaccgaataattctctgagcagttttgattttattaatcaaattgaaacaatcagaaatgaaaaaggtaatgcatatgtgctaattgaacgagacatctatcatcaaccatcaaagcttttcttattaaatccagatgttgttgaaatgttaattgaaaaccaatcacgtgaactttattattccattcatgctgcaactggaaacaaattgattgttcataatatggatatgttgcattttaaacacatcgtggcgtctaatatggtgcaaggcattagtccgattgatgtgttgaagaatacaactgattttgataatgcagtaagaacctttaatcttacagaaatgcaaaaacctgattctttcatgcttaaatatggttccaatgtaggtaaagaaaaaaggcagcaagtgttagaagattttaaacagtactatgaagaaaacggtggaatattattccaagagcccggtgttgaaatcgaaccgctacctaaaaaatatgtctctgaagatatagtggcaagcgagaatttaacaagagaaagagtagctaacgtttttcaattgccctcagtatttttaaacgcaaaatcaaacacaaattttgcgaaaaatgaagagttaaacagattttacttacagcataccttattgccaatcgtcaaacagtatgaagaagaatttaatcgaaaactacttactaaaacagatagagaaaaaataggtattttaaatttaacgttaaatcttatttaagggctgatagtgcaacacaagcagaagtgtactttaaagcagttcgtagtggctattacactataaatgacattagagagtgggaggatttaccaccagttgaaggtggagacaagccactaataagcggagatctgtatccgattgacacgccacttgaattaagaaaatctttgaaaggtggtgataaaaatgtcaaagaaagctaagtattttcaaatgaaaagaaaatcaaaaagtaaaggtgaaatattcatttatggtgatattgtaagtgataaatgggttgaaagcgatgtaactgctacagatttcaaaaataaactagatgaactaggagacatcagtgaaatagatgttcatataaattcatctggaggcagtgtatttgaaggacatgcaatatacaatatgctaaaaatgcatcctgcaaaaattaatatctatgtcgatgccttagcggcatcaattgctagtgttatcgctatgagtggtgacactatttttatgcacaaaaatagttttttaatgattcataattcatgggttatgactgtaggtaatgcagaagaattaagaaagacagcggatttacttgaaaaaacagatgctgttagtaattcagcttatttagataaagcaaaagatttagatcaagaacacttaaaacagatgctagatgcagaaacttggcttactgcagaagaagccttatctttcggcttaatagatgaagttttaggagctaatgaaatagctgctagtatctctaaagagcagtataagcgtttcgagaacgtcccggaagatttaaagaaagatgtagacaaaatcacaaaaattgatgatgtagatacatctgaattggttgaaacacctaaagaaagtatgtcactagaagaaaaagaaaaaagagaaaaaattaaacgcgaatgcgaaattttaaaaatgacactgaattattaggaggaaatgaaatgccgacattatatgaattaaaacaatccttaggtatgattggacaacaattaaaaaataaaaatgatgaattgagtcagaaagcaacagatccaaatattgatatggaagacatcaaacaactagaaacagaaaaagcaggtttacaacaaagatttaacattgttgaaagacaagtgaaagacattgaagaaaaagaaaaagcgaaagttaaagacacaggagaagcttatcaatctttaagtgctaatgagaagatggttaaagctaaggcagagttttatcgtcacgcgattttaccaaatgaatttgaaaaaccttcaatggaggcacaacgtttattacacgctttaccaacaggtaatgattcaggtggagataagctcttaccaaaaacactttctaaagaaattgtttcagaaccatttgctaaaaaccaattacgtgaaaaagctcgtctaactaacattaaaggtttagagattccaagagtttcatatactttagacgatgatgacttcattacagacgtagaaacagcaaaagaattaaaattaaaaggtgatacagttaaattcactactaataaattcaaagtatttgctgcaatttcagatactgtaattcatggatcagatgtagatttagtaaactgggttgaaaacgcactacaatcaggattagcagctaaagagcgtaaagatgccttagcagtaagtcctaaatctggattagaacacatgtcattttataatggatctgttaaagaagttgagggagcagacatgtatgatgctattattaacgctttagcagatttgcatgaagattatcgtgataacgcaacaatttacatgcgatatgcagattatgtcaaaattattagtgttctttcaaatggaacaacaaatttctttgacacaccagcagaaaaagtatttggcaaacccgtagtatttacagatgcagcagttaaacctattgtgggagatttcaattattttggaattaactatgatggaacaacttatgacactgataaagatgttaaaaaaggcgaatatttgtttgtattaactgcatggtatgatcagcaacgtacattagacagtgcattcagaattgcaaaagcaaaagaaaatacaggttcattacccagctaagccccaaaaggttaatgtaacagctaaggctaaatcagctgtaatatcagccgaataggggtgatgaaatgagtttagaagaaattaaattgtggttgagaattgactataatttcgaaaatgatttaattgaaggtctcattcaatcggctaagtctgagttactattaagtggggttccagattatgacaaaaatgacttggaatacccgcttttttgtacagcgattaaatatatcattgcaagagattatgaaagtcgtgggtactcaaatgaccaatctagaagcaaggtgtttaatgaaaagggattgcaaaaaatgattttgaaattaaaaaagtggtaggtgatttttaaatggaatttaatgaatttaaagatcgcgcgtatttttttcaatatataaataaaggaccatatccagatgaagaggaaaaaatgaaattgtatagttgcttttgtaaaatatataatccgtctatgaaagatagagaaattttaaaagcgactgaatcaaagtcgggactaaccataattatgaggtcttctaaaactgaatatctaccacaaacaaaccacttggttaaaattgacagaggttcatattccgataaattattcaacattgaagaaataagaattgatacaccagatataggctataatacagtggttttatcagaaaaatgagtgtagaaattaaaggaatacctgaagtgttgaagaaattagaatcggtatacggaaaacaagcaatgcaagctaagagtgatagagctttaaatgaagcatccgaattttttataaaggctttaaagaaagaatttgagagttttaaagatacgggtgctagcatagaagaaatgactaaatctaagccttatacaaaagtaggaagtcaagaaagagctgttttaattgaatgggtaggccctatgaatcgcaaaaacattattcacttgaatgaacatggttatacaagagatggaaaaaaatatacaccaagaggttttggagttattgcaaaaacattagctgctagtgaacggaagtatagagaaattataaaaaaggagttggccagataaatgaatatattaaacactgtaaaaggaattttattatctgatgcagagctcaaaacacatataaattctagaatatactattataaagtcactgaaaatgctgaaacttccaaaccttttgttgttattacacctgtttatgatttaccttcagactttatttctgataaatatcttagtgaagaatacttaattcaaatagatgtagaatcttcaaatcatcagaaaacaattgatataacaaaacgaataagatacctgttatatcaacaaaatttaattcaagcatcaagtcagttagatgcttattttgaagaaactaaacgttatgtgatgtcgagacgatatcaaggcatacccaaaaatatatattataaaaatcagcgcatcgaataggtgtgctttttaatttttaaggaggaaataagcaatggcagaaggacaaggttcttataaagtaggttttaaaagattatacgttggagtttttaacccagaagcaacaaaagtagttaaacgcatgacatgggaagatgaaaaaggtggtacagttgacctaaatatcacaggtttagcaccagatttagtagatatgtttgcatctaacaaacgtgtatggatgaaaaaacaaggtactaatgaagttaagtctgacatgagtattttcaatattccaagtgatgatttaaacacagttattggacgtactaaagataaaaatggtacatcttgggtaggagagaatacaagagcaccgtatgtaacagtaattggcgaatcggaagatggtttaacaggtcagccggtatatgtagccttacttaaaggtacttttagtttagattcaattgaatttaaaacacgaggtgaaaaagcagaagccccagagccaacaaaattaactggtgactggatgaacagaaaagttgatgttgatggaacgtcacaaggtattgtatacggttatcatgaaggtaaagaaggagaagaagaattcttcaaaaaagtattcgttggatacactgacagtgaagatcgatcagaggattctgaagattcgttacccagctaacccccaaaatgttgaagtagcagttaattcaaaatctgcaactgtttcagcagaataggggctttcaaaataaatcaaaggagaataatttatgactaaaactttaaaagtttataaaggagacgatgtcgtagcctctgaacaaggtgaaggcaaagtatctgtaactttatctaatttagaagcggatacaacttatccaaaaggtacttaccaagtgtcatgggaagaaaatggcaaagaatctagtaaagttgatgtacctcaatttaaaactaatccaattttagtctcaggcgtatcatttacaccagaaactaaatcaattacggtaaataccgatgacaatgttgaaccaaacatttcaccaagtacagcaacgaataaaacgttgaaatatacaagtgaacatccagagtttgttactgttgatgagagaacaggagcaattcacggtgtagctgagggaacttcagttatcactgctacgtctactgacggaagtgacaagtctggacaaattacagtaacagtaacaaatggataattatttgaataaaaggagctaatacaatgattaaatttgaaattaaagaccgtaaaacaggaaaaacagagagctatacaaaagaagatgtaacaatgggcgaagcagaaaaatgctatgagtatttagaattagtaaatcaagagaataaaaaagaagcacctaacgcaacaaaaatgagacaaaaagagcgacagttattagtagatttatttaaagatgaaggattgactgaagaagatgttctgaacaagatgagtactaaaacttatacaaaagccttacaagatatatttcgagaaatcaatggtgaagatgaagaagattcagaaactgaaccagaagagatgggaaagacagaagaacaatctcaataaaagacattttatcgaacattaagaaaatacaacgtttctgtatggagcagtatgggtggacattaactgaagtcagaaaacagccgtatgtaaaacttttagaaatacttaatgaagagaataaagaagagactgaagaaaaacaaagtgaacaaaaagtcattacaggtacggatttaagaaaactttttggaagctagaaaggaggttaatatgaatgaaaaagtagaaggcatgaccttggagctgaaattagaccatttaggtgtccaagaaggcatgaagggtttaaagcgacaattaggtgttgttaatagtgaaatgaaagctaatctgtcagcatttgataagtctgaaaaatcaatggaaaagtatcaggcgagaattaaggggttaaatgataagcttaaaattcaaaaaaagatgtattctcaagtagaagatgagcttaaacaagttaacgctaattaccaaaaagctaaatccagtgtaaaagatgttgagaaagcatatttaaagttagtagaagccaataaaaaagaaaaattagctcttgataaatctaaagaagccttaaaatcatcgaatacagaacttaaaaaagctgaaaatcaatataaacgtacaaatcaacgtaaacaagatgcgtatcaaaaacttaaacagttgagagatgcagaacaaaagcttaagaatagtaaccaagctactactgcacaactaaaaagagcaagtgacgcagtacagaagcagtccgctaagcataaagcacttgttgaacaatataaacaagaaggcaatcaagttcaaaaactaaaagtgcaaaatgacaatctttcaaaatcaaatgataaaattgaaagttcttacgctaaaactaacactaagttaaagcaaacagaaaaagaatttaatgatttaaacaatactattaagaatcatagcgctaatgttgcaaaagctgaaacagctgttaataaagaaaaagctgctttaaataatttggagcgttcaatagataaagtttcatccgaaatgaagacttttaacaaagaacaaatgatagctcaaagtcatttcggcaaacttgctagtcaagcggatgtcatgtcaaagaaatttagttctattggagataaaatgacttccctgggacgtacgatgacgatgggcgtatctacaccgattactttagggttaggtgcagcattaaaaacaagtgcagacttcgaagggcaaatgtctcgagttggagcgattgcgcaagcaagcagtaaagacttgaaaagcatgtctaatcaagcagttgacttaggagctaaaacaagtaaaagtgctaacgaagttgctaaaggtatggaagaattggcagctttaggctttaatgccaaacaaacaatggaggctatgccaggtgttatcagtgcagcagaagcaagtggtgcagaaatggctacaactgcaactgtaatggcttcagcgattaactctttcggtttaaaagcatctgatgcaaatcatgttgctgatttacttgcgagatcagcaaatgacagtgctgcagatattcagtacatgggagatgcattgaagtatgctggtactcctgcaaaagcattaggagtttcaatagaggacacttccgcagcaattgaagttttatctaactcaggtttagagggttctcaagcaggtactgccctaagagcttcatttatcaggctagctaatccaagtaaaaatacagctaaggaaatgaaaaaattaggtattcatttgtctgatgctaaaggtcaatttgttggcatgggtgaattgattagacagttccaagacaacatgaaaggcatgacacgagaacaaaaactagctacagtggctacaatagttggtactgaagcagcaagtggatttttagccttgattgaagcggggccagataaaattaataactatagtaaatccttaaagaattccaatggcgaaagtaaaaaagcagcagatttgatgaaagataatctcaaaggcgctctggaacaattaagtggcgcttttgaatcgttagcaattgaagttggtaaagatttaacgcctatgattagagcaggtgcggaaggattaacaaaattagttgatggatttacacatcttcctggttgggttagaaaggcttcggtaggcttagcaatttttggtgcatctattggtcctgctgttcttgctggaggcttattaatacgtgcggttggaagcgcggccaaaggatatgcatcattaaatagacgcattgctgaaaatacaatactttctaataccaattcaaaagcaatgaaatctttaggtcttcaaaccttatttcttggttctacaacaggaaaaacgtcaaaaggctttaaaggattagccggaactatgttgtttaatttaaaacctataaatgttttgaaaaattctgcaaagctagcaattttaccgttcaaacttttgaaaaacggtttaggattagccgcaaaatccttatttgcagtaagcggaggcgcaagatttgctggtgtagccttaaggtttttaacaggacctataggtgctacaataactgctattacaattgcgtataaagtttttaaaaccgcatatgatcgtgtggaatggttcagaaacggtattaacggtttaggagaaactataaagttttttggtagcaaaattattggcggtgctgttaggaagctaggagattttaaaaattatcttggaagtataggcaaaagcttcaaagaaaagttttcaaaggatatgaaagatggttataaatctttgagtgacgatgaccttctgaaagtaggagtcaacaagtttaaaggatttatgcaaaccatgggcacagcttctaagaaggcatccgatactgtaaaagtgctagggaaaggtgtttcaaaagaaacagaaaaagctttagaaaaatacgtacactattctgaagaaaacaacagaatcatggaaaaagtacgtttaaactcgggtcagatatcagaagacaaagcaaaaaaacttttgaaaattgaaacggatttatctaataaccttatagctgaaatagaaaaaagaaataaaaaggaactcgaaaaaactcaagaacttattgataagtatagtgcattcgatgaacaagaaaagcaaaacattttaactcgaactaaagaaaaaatgacttgcgaattaaaaaagagcaagaactcaatcagaaaatcaaagaattgaaagaaaaagctttaagtgatggtcagatttcagaaaatgaaagaaaagaaattgaaaagcttgaaaatcaaagacgtgacatcactgttaaagaactgagtaagactgaaaaagagcaagagcgtattttagtaagaatgcaaagaaacagaaatgcttattcaatagacgaagcgagcaaagcaattaaagaagcagaaaaagcaagaaaagcaagaaaaaaagaagtggacaagcaatatgaagatgatgtcattgctataaaaaataacgtcaacctttctaagtctgaaaaagataaattgttagctattgctgatcaaagacataaggatgaagtaagaaaggcaaaatctaaaaaagatgctgtagtagacgttgttaaaaagcaaaataaagatattgataaagagatggatttatccagtggtcgtgtatataaaaatactgaaaagtggtggaatggccttaaaagttggtggtctaactttagagaagaccaaaagaaaaaaagcgataaatacgctaaagaacaagaagaaagagctcgtagaaacagagaaaatataaagaaatggtttggaaatgcttgggacggcgtaaaaagtaaaactggcgaagcctttagtaaaatgggcagaaatgctaatcattttggcggcgaaatgaaaaaaatgtggagtggaatcaaaggaattccaagtaaattaagttcaggttggagctcagccaaaagttctgtaggatatcacactaaggctatagctaatagtactggtaaatggtttggaaaagcttggcaatctgttaaatcgactacaggaagtatttacaatcaaactaagcaaaagtattcagatgcctcagacaaagcttgggcgcattcaaaatctatttggagaggcacatcaaaatggtttagcaatgcatataaaagtgcaaagggctggctaacggatatggctaataaatcgcgatcgaaatgggataatatttctagtacagcatggtcgaatgcaaaatccgtttggaaaggaacatcgaaatggtttagtaactcatacaaatctttaaaaggttggacaggagatatgtattcaagagcccacgatcgttttgatgcaatttcaagttcggcatggtctaacgctaaatcagtatttaatggttttagaaaatggctatcaaaaacatatgattggattagagatattggtaaagacatgggaagagctgcggctgatttaggtaaaaatgttgctaataaagctattggcggtttgaatagcatgattggcggtattaataaaatatctaaagccattactgataaaaatctcatcaagccaatacctacattgtctactggtactttagcaggaaagggtgtagctaccgataattcaggagcattaacgcaaccgacatttgctgtattaaatgatagaggttctggaaacgccccaggtggtggagttcaagaagtaattcacagggctgacggaacattccatgcaccccaaggacgagatgtggttgttccactaggagttggagatagtgtaataaatgccaatgacactctgaagttacagcggatgggtgttttgccaaaattccatggtggtacgaaaaagaaaaaatggatggaacaagttactgaaaatcttggtaaaaaagcaggggacttcggttctaaagctaaaaacacagctcataatatcaaaaaaggtgcagaagaaatggttgaagcggcaggcgataaaatcaaagatggtgcatcttggttaggtgataaaatcggcgatgtgtgggattacgtacaacatccagggaaactagtaaataaagtaatgtcaggtttaaatattaattttggaggcggagctaacgctacagtaaaaattgctaaaggcgcatactcattgctcaaaaagaaattagtagacaaagtaaaatcgtggtttgaagattttggtggcggaggcgatggaagctatctatttgactatccaatttggcaaaggtttgggagttacacaggtggacttaactttaatggcggtcgtcactatggtgtcgactttggcatggatccaggaacgaacatttatgctgttaaaggcggtatagctgataaagtatggactgattacggtggcggtaattctatacaaattaagaccggtgctaacgaatggaattggtatatgcatttatctaagcaattagtaagacaaggccaacgtattaaagctggtcaactgatagggaaatccggtgctacaggtaatttcgttagaggagcacacttgcatttccaattgatgcaagggtcacatccaggtaatgatacagctaaagaccctatgaaatggttgaagtcacttaaaggtagtggcgttcgaagtggttcaggtgttaataaggctgcatctgcttgggcaggcgatatacgccgtgcagcaaaacgaatgggtgttaatgttacttcgggtgatgtaggaaatatcattagcttgattcaacacgaatcaggaggaaatgcaggtataactcaatctagttcgcttagagacatcaacgttttacagggcaatccagcaaaaggattgcttcaatatatcccacaaacatttagacattatgctgttagaggtcacaacaacatatatagtggttacgatcagttattagcgttctttaacaacagatattggcgctcacagtttaacccaagaggtggttggtctccaagtggtccaagaagatatgcgaatggtggtttgattacaaagcatcaacttgctgaagtgggtgaaggagataaacaggagatggttatccctttaactagacgtaaacgagcaattcaattaactgaacaggttatgcgcatcatcggtatggatggcaagccaaataacatcactgtaaataatgatacttctacagttgaaaaattgttggaacaaattgttatgttaagtgataaaggaaataaattaacagatgcattgattcaaactgtttcttctcaggataataacttaggttctaatgatgcaattagaggtttagaaaaaatattgtcaaaacaaagtggacatagagcaaatgcaaataattatatgggaggtttgactaattaatgcaatcttttgtaaaaatcatagatggttacaaggaagaagtaataacagattttaatcagcttatatttttagatgcaagggctgaaagtccaaacaccaatgataacagtgtaactattaacggagtagatggtattttaccgggcgcaattagttttgcgcctttttcattagtattaaggtttggctatgatggtatagatgttatagatttaaatttatttgagcattggtttagatctgtgtttaatcgcagacatccttattatgttattacttctcaaatgcctggtgttaaatatgcagtgaatacagctaatgttacatctaatttaaaagatggttcttcaactgaaattgaagttagtttaaatgtttataaaggatattctgaatcagttaattggaccgatagcgagttcttattcgactctaattggatgtttgaaaatggaattcctcttgatttcacacctaaatatacacatacatcaaatcaatttactatttggaacggttccactgatacgataaatccacgattcaagcacgatttgaaaatattaattaatttaaatgcgagtggaggatttgaactagttaactatacaacaggagatacttttaagtacaacaaaagtatagataaaaacactgattttgttttagatggtgtgtatgcatatcgagatataaatagagtgggaattgatacaaatagaggcattataacattagcgccaggtaaaaatgaatttaagattaaaggagacgtcagtgatattaaaactacatttaagtttccttttatttataggtaggtgacttaatggattatcatgatcatttatcagtaatggattttaatgaattgatttgtgaaaatttactagatgtagattatgggtcttttaaagaatattatgaactgaatgaagctaggtacatcacctttacagtttatagaactactcataatagttttgtttttgatttattgatttgtgaaaacttcataatttatcatggtgaaaaatacacaattaagcagacagcgccaaaggttgaaggtgataaagtttttattgaagttacggcgtatcacataatgtatgaatttcaaaatcactcagtggaatcaaataagcttgatgacgacagtagcgaaactgataaaacgccagaatactctttagatgagtacttaagatatggatttgcaaatcaaaaaacgtcagtcaagatgacctataaaataattggagattttaaaagaaaaataccaattgatgaattaggtaataaaaatggcttagaatattgtaaagaagcagtagatttgtttggttgtattatttatccaaatgatacggagatatgtttttattctcctgaaacattctatcaaagaagtgaaaaagtaataaggtatcaatataatactgatactgtgtctgctactgtcagtacgttggaattaagaacagctataaaagtttttgggaaaaagtacacagctgaggaaaagaaaaattataaccctattaaaacaactgacattaattattcaaatggtttcataaaagaaggcacttatcggactgaaacaattggttctaaagctactattaactttaattgcaagtatggtaatgaaacagttagatttacaatcaaaaaaggttcccaaggtggaatatataagttgattttagacggcaagcaaattaagcaaatttcttgttttgctaagtcggttcagtctgaaacaatagatttaataaaaaatattgataaaggcaagcatgttttagaaatgatatttttaggagaagaccccaaaaatagaattgatagatcttcaaataaaaaagcgaagccttgtatgtacgttggaactgaaaaatcaacagtcttaaatttaattgctgataattcaggtcgcaatcaatacaaagcaattgttgattatgtcgcagatagtgcaaagcagtttgggattcgatatgctaatacgcaaacaaatgaagatatcgaaacacaggataagctgttagaatttgcaaaaaagcaaataaatgatactcctaagactgaattagatgttaattatataggttatgaaaaaatagaaccaagagatagcgtattttttgttcatgaattaatgggatataacactgaattaaaggttgttaaacttgataggtcacatccatttgtaaacgcaatagatgaagtgtctttcagcaatgaaataaaagatatggtacaaattcaacaagcgcttaacagacgagttattgcacaagataatagatataactatcaagcaaatcgtataaatcatttatacactagtactttgaattctcctttcgagacaatggatatagggagtgtattaatataatggcaacagaagaagttaaaatcaaagcgctacttgaaaacgataaacagtactttccagctacacattggaaagctataaatgggataccttatgcaggcagtagtgatattgatggattgcctcaagacggtatcatttcggtagatgataaaaataaattagataatttaaaaataggcgaagcaggaattattcaaaatagcattgtacagaaatccccaaacggtaaattgtggaaaataacagttgacgatagtgggaaacttggtacagtgctattttattagaaaggaaggtgcattatggaaaatttgtatttaataaaggatttgggagctttagcaggtcgagattatagagctaaggaagtacaaaacttgcaaagaatagagcaatttgcacttggcttgacaacagagtttaagttgcatcagaaagctaaaacaattcaacacttcgctgagcaaatttattataatggtagatcgcaagcagcagtaaacaaatctttacaaagtcaaattaacgcacttgttgtggcaccacgtaataacagtgctaatgagattgttcaagctcgagttaatgtaaacggcgaaacctttgacacattaaaagaacatttagacgattgggaaaccaaaactcaaattaataaagaggaaactataagagaattaaataagaccaaacaagaaattcttgatatcgagtatcgttttgaacctgataagcaagaatttttatttgtgacagaacttgcacctcttacaaatgcagtaatgcaatccttctggtttgataacagaaccggtatagtgtacatgacacaagcaagaaataacggttatatgttaagtcgtttaagacctaatgggcaatttatagacagctcattaattgtaggtggcggacatggtacacataacggttatagatatattgatgatgagttatggatttatagttttatcttaaatggtaataatgaaaacaccttagttcgctttaagtacacgcctaatgtagagattagttatggcaagtatggtatgcaagacgtatttacaggacatccagaaaagccttatatcacaccagtcataaatgaaaaagaaaataaaattctatacagaattgagagacctagaagtcaatgggaacttgaaaactcaatgaattatatagagataagaagtttagacgatgttgataaaaatattgataaagttttgcataaaattagcattcctatgagactaacaaatgaaactcagccaatgcaaggtgtgacttttgatgaaaaatacttgtattggtacacaggagatagtaatccgaataatagaaactatttaacggctttcgatttagaaacaggagaagaagtatatcaagttgatgctgattatggtggcacacttgattcatttcctggtgaatttgcggaagcagagggtctgcaaatatactatgataaagatagcggtaaaaaggctttgatgctaggtgttactgttggtggcgatggaaatagaacacatcgtattttcatgattggccaaagaggtattttagaaattctgcactcgagaggcgtcccttttatcatgagtgatacaggcggtagagttaaacctttaccaatgagacctgataaactaacaaaccttggaatgttaacagagccaggtctttattatttatacacagatcatacagttcaaattgatgatttcccactaccaagagaatggcgcgatgcaggttggttcttagaagtaaaaccaccacaaactggcggagatgttattcaaatattaacgcgtaatagttatgcaagaaacatgatgacttttgaaagggtgctttctgggagaacgggagacatttcggactggaattatgtgcctaaaaatagtggtaaatgggagagagtaccttcattcatcacaaaaatgtcagatattaatatagtaggtatgtcgttttacttaacaacagatgatacaaaacggtttacagattttccgactgaacgtaaaggggtagcaggttggaacttatatgtagaagcttcaaatacaggtggttttgttcataggctagttcgtaatagtgttacagcatctgctgagatactattgaaaaactatgatagtaaaacaagttcagggccatggactttacacgaagggagaattataagttaatgagtaatttagagaaatctgtaaatattaatttagagaacacagcgcattatgaaaatatttcaaatctagatataacttttagaacaggagagagtgattcttctgttcttctttttaatatcactaaaaataatcaaccgttattattgagtgaagaaaatatcaaagcacgaatagcgattcgaggtaaaggagttatggtggttgctccactagaaatattagatccatttaaaggcacattaaaatttcaattacctaacgatgtaattaaacgagatggaagttatcaagctcaagtttcggttgcagaattaggtaattcagacgtggtagttgtcgagagaactatcacatttaacgttgaaaaaagtttgtttagcaagattccctctgaaacaaaattacactatattgttgagtttcaagaattagaaaaaactattatggatcgcgcgaaagcaatggacgaggctataaaaaatggtgaggattatgcgagtctgattgaaaaagctaaagaaaaaggtctatcagatattcaaatagcaaaatcttcaagtattgatgaattaaagcaacttgctaatagccatataaccgatttggaaaataaagctcagtcttattcaagaacatttgatgagcaaaagcgatatatggatgagaaacatgaggctttcaagcaatcggtaaatagcggtggtttagtcacaagtggttcaacatcgaattggcaaaaagctaagattaccaaagatgatggtaagataatgcagattactggatttgattttaacaatccagaacaaagagtaggagatacaacgcaatttatttatgtatcacaagctataaattatccaagaggtgttagtactaacggtactgtcgaatatttagtagtaacttcagattacaagcgtatgacttaccgaccgaacggtacaaataaagtgtttgttaaaagaaaagaaggggattcatggtctgagtggtcagaattagctattaatgattacaatacaccttttgaaactgttcaaagtgctcaatcaaaagctaatatggccgaaagtaacgctaaattatacgcagatgacaagtttaataaaaggtattcggttatttttgagggaacagcaaatggtgtgggctctacattgtacttaaatgagagtttagatcaatttattttgttaattttttatggaacttttccagggggagactttactgagtttggcaatccctttggtggcggtaaaatttcattgaatccctcaaatcttccagatggtgatggaaatggtggaggtgtttatgagtttggattaactaaatctagtcgtacatctttaactatatcaaacgatgtctatttcgacttaggaagtcaaagaggctctggtgcgaacgcaaatagaggaacaattaacaaaattataggagtgagaagataatgcaaatattagttaataaacgcaatgagattatttcatatgctgttattggtggctttgaagaaggcattgatattgaaaatttaccagaaaatttctctcaagtttttagacctaaagcctttaaatattcaaatggggaaatagtttttaacgaagattattcagaagaaaaggatgacacacatcaacagattgataatgaagagaatagtacaggtgcttctgatgatatcttacgaaaaatggttgctagtatgcagaagcaagttgttcaaagtacaaagttattgatgcaagttaataaacaaaacgctttgatggcaaaacagattgtagcattcaataaaaaattagaagaggttaaaggagagactgaaaatgcttaaattaatttcaccaacattcgaagatattaaaacttggtatcaattgaaagaatatagtaaagaagatatagcgtggtatgtagatatggaagttatagataaagaggaatatgcaattattacaggagaaaagtatccagaaaatctagagtcataggccgagagtctatggctttttaatttaaataaagtgggtggcataatgtttggatttaccaaacgacatgaacaagattggcgtttaacgcgtttagaagaaaatgataagactatgtttgaaaaattcgacagaatagaagatagtcttagagcgcaagaaaagatttatgacaaattagatagaaattttgaagaattaaagcgcgacaaagaagaagatgaaaaaaataaggaaaaaaatgccaaaaatattagagatatcaagatgtggattcttggattaatagggacgatactaagtacgtttgttatagcaatattaaaaacaatattcggtatttaaaggaggtgagtaccatgcttaaagggattttaggttatagtttttgggcttgtttttggtttggtaaatgtaagtaacagttaagagtcagtgctttgacactggctttttattattgttgtgattatggtgatatacaaaagtgagcaagttggatagatggtggctatctgagtataaggaggtggtgcctatggtggcattactgaaatctttagaaaggagacacctttgtggtatctgttgttgatgcactaaatttaatgtttagtttcggtatgtttatcgttactttgcttagtttagtcatcgcaatcgttaaattaaaccataaaaaataaccatcgctaactttgacgagtacgatggttagaggattatataaattcatttaactacagaggtcaccgtctttttaacgggctcactagggtaacatgtttccctttttctatatataaattaacacactgtaatataaatatcaaatagatggcttattggtcgtctttttattttggataaaaggagcaaacaaatggaaacaaaagtaataacaagatatattgtattaattttagcgttagtcaatcagtttttagcgaacaaaggtataagcccgataccagtagatgaagagagtatttcatcgattatcttaacagtcattgctttatacaccgcttataaagacaatccaacatcacaagaaggacgctgggcgaatcaaaaactaaagaaatataaagctgaaaataagtatagaaaagcaacaggacaagcgccaattaaagaagtaatgacacctacaaatatgaatgacacaaatgatttagggtaggtgattgatatatgttaatgacaagaaatcaagcagaaaaatggtttgataactcattaggaaaacaatttaatccagatggttggtacgggtttcaatgttacgattatgcaaatatgttctttatgttagcaacaggagaaaggttacaaggtttatacgcttataatatcccatttgataataaagcgaaaattgaaaaatatggtcaaataattaaaaactatgacagttttttaccacaaaagttggacattgtcgtcttcccatcgaagtatggtggtggagcgggtcatgttgaaattgttgagagtgcaaatttaaacactttcacatcatttggccaaaactggaatgggaaaggatggactaatggcgttgcgcaacctggctggggtcctgaaactgttacaagacatgtccattattatgacaatccaatgtattttattagattaaatttccctgatagcataagtgttaaggataaggctaaaggtattattaagcaagcaactgcaaaaaaagaggcagtaattaaacctaaaaggattatgcttgtggctggtcatggatataatgatccaggcgcagttggtaatggaacaaacgaacgtgatttcatccgtaaatatataacgcccaatatcgctaagtatctaagacatgcgggacatgaagttgctttatatggcggctccagtcaatcacaagacatgtatcaagatactgcatacggtgttaatgtagggaataaaaaagactatggcttatattgggttaaatcacaggggtatgacattgttttagagatacatttagatgcagcaggagaaagcgcaagtggcggtcatgttattatctcaagtcaattcaatgcagatactattgataaaagtatacaagatgttattaaaaataacttgggacaaataagaggtataacacctcgtaatgatttgctaaatgttaatgtatcagctgaaataaatattaattaccgcttatctgaattaggttttattactaataaaaatgatatggattggattaagaaaaattacgacttgtactctaaactaatagctggtgcgattcatggtaagtctataggtggtttggtagctagtgaggttaaagtgccagttaaaaacgaaaagaatccaccagtaccagcaggttataccttagatagtaaaggggtaccatataaaaaagaacaaggcaattacacagtagctaatgttaaaggtaataatgtaagagacggttattcaactaattcaagaatcactggggtattacctaacaacacaacaatcacgtatgacggcgcctattgtatcaatggttacagatggatcacttatattgctaatagtggacaacgtcgttatattgcgacaggagaggtagacaaggcaggtaatcgaataagtagtttcggtaagtttagtgcaatataatatttgcttaaaagctcacgatttgttatactttaaaagggtgttttacagttttcaaattattgtgtggatacaaggaagttattttatttgaagctgttacatttaattataaatttggatataatgttcgatcctttgcgacttaatctgtttactaataactagaaatattttataattagtaagtcatgtctttttaagcaggtgcgttacacacctgctttttttatttgcatttaaagataagatgtgataaatttcattggaacattgtgcagcatttctctcaagtttatattgtggctagctttcggactgattttttgttattatttaaagacatgcatcaactatttacatcatcattgttagcccaagcatgtcactgggcgtgttttcgttttatgatagagagcaaagttcttgctacccccgtagtatagaagcagctttaacacacccgcataatagtttgcggggtgttttttgtttggaatacatgtttatttgctcttaactgcatattaggtgacttataggacggaatatgatacagttatttagcagacagttatcaaagcgattgcataatgcaatcgcttttttctttttaaatagtttagcttatgttataattatattagaaagccttcttatacaaaatacatgcgatacagaaagataagcactttggtgtttgtctttttatttgaataaaataaaaggtttatgttattatattattagaaatttatccagattttctctctaagctaaaattatcattttcgggcaggtacttagtacttgcctatttttttatgttataattaactgtatatagtaggagtgaactatataccctgttaagtggcctagtaacctaacacttatcctgcaattgataccctttttgcccgtcactcaatacatatcatagcggcataagattgttaaagtcgccacaccacctaaaccaattactgcgtggttatttttttgtaatgcaaatgtcgttcgataaataatcaaaatatttttagatttgatgcaatacggtgtttgcttcaagcttatagtatgataacatgagaacagaatatttcattgttattttttaatttatttttatataagtgtaaaacacactgttgtttcattttagtgagatgctataatacttgtatctttcgtttaagatataagcttatgacataaaagtcttcctataaaagaaggcttttatgtttttatatatccataggtataacagatagcacagagctctcagacattactagtcaggacttaaaacattgagagtgcatagttaaaaagtctagaacgttaaatttttagattatgtgaaaagtatttatattatttgaaatttattttagttatggtataataaaaaaggatattactatgtaatgagctcaaaaagtatttatagccagccgtgcggctggtttttttgtatgaaatttaatatgaaaggtcgtaagatatgattaaggtaatcatattacttttattaatgtgtgtacttagctatattttgacaaataaacataactatttcttattcgtaaagtctataatgtacggtgttctttttatgattttaggttatgcttctcttttattatccacagtgttgcttgttttaatatcattgttttttaatttagaagatagtgactacttttggctagggttaattcaaattttgctatcagggataatgcaaattactatagtgaaaataactttgcgtaaaataactttgaaagaagaggaaatattagtattagaacatattatacaatggacaataatttattttgcattatatcaatctttagttgaaaatttaaagcttgaatatataaatttaaaagactttcattcgatactcttaaatccatctaatttaaatattggatttttgccagcactgattttaacgtggataactatatttaagtttaaaattgacaaataaatacaagttgaacgcaaaggattttcagggcagaaaaagggcagattatttaaatatgagtaaacactcttgtaatgatatttagattgatagtgcttgaaacgttgatttaacaacgtttttaaatacttatgtacatttacacataaccgctctttaatcatacaaggatgggatcatgtcgattttatcggtgtagatttcctagatttcaagcgtaaaggtgcagaactcgccaacttctatacaggtattataaatgacttgttgcgtgttgaagcaactgaaggtaaaggtacacaattgaaagcaagttaaattcattttcgtaatttaatatgctatgcatttcgtgctactaacatggcacagcagatataagtaacatcacagtgttgaatttaaaaatagtaaagtgaaataaagcgcctgtctcattagcgaaaactaaagggacaggcgtatctgtttatgagcttaataaattgtatgaataatatggttgattgaataactgtttatcatgatgataaattgagtttttaaaaataatggtatattacaccattgttatagcgtttaagaaatcaacaactttacgataaatagtgattgcttcgtcattaggtctacgatcaaaatcatgctcgtttttattcacgcgttcaaatgttgaatgtggaacatgattcatgatatgttcgctttcctcaacgggaacatcataatcgccattacaatgcgcaacgaaaacaggtggaagtgttttaagttcatttggtgagatgttgtattttgaatcggtataatcagcaatattaatcatatttatccatttacctgtgccacgtgcataaacgtagattaaaaaacgttgtgcgatttgatcttgaacaaccggtgttggtgaagtgagttgtgcaatcattgtttcgtttacgctttgagctattttagcgtaatagctattagttgttttaaaaggttcagtgttgatgcgactataaccataaaaatcaataacaccatcaatatctctgtctcgtgcaattaatagacttaaatatgcacctgatgatctgccaaaggtaaaaatagggcaattagaatattgtgattgaatcgcatcgaatgatgcgtagacatcctcaataatgcaatcgagacttacttctggtaataagcgataacttagttgaattaaatcgtaatgttccgtaaggatatcgatatactgtggggataaatcgttagctttaccgaacattaatccaccaccgtggatatagacaatagcgccttttgttggttgattttttgctttaataattgtgtagggtaattcaaatgcatctttagtaattactttatctttaatttcagtcacgactatacagactccttatttttgaaattgatgtcattataacactgtattaaatttccatgaaaaatagtcttaagacgatgagtcatgataattctgttccaattgacgtaaagcgtcacgggtatgcttctttagaccttccccataatccatcattttaacaatatctttaaaagcagcatgtggaatggctaaatcttctaaatctgccatagaaaattcaagattgatatcatgtggtcggtgttcagcaagtttatgcacaaagtcaggttctgtgacaaaaggcgaagacatgccgaccatatctgcatgttgtaaagcatctaaagcagactctggagaattaatcccgccacttgcaattaaagggatacgacctgctaaatgttcatagacaatttggttaactggccgaccgaaatgttcacctggtgtacgagacgtattttgataaatatgtcgaccccagctagcgattgctaaatattggatgtttgaaacgtccatgacccaatcgattaattgattgaactcgtcaatggtatatcctaaatcactacctctggtttcttctggcgttgctcgaaatcctaaaataaaattgtcaggtgcttctttatcaatcacttcttgtaccgcacgcataacttctaaacataatcttgcacgattttttaatgagtcggcactgtaatggtctgtacgtttattcgaaaaagttgagaaaaatgtttgaatcagcaaacgttgtgcaatcgaaatttccacaccatcaaaccctgctttaatcgcgcgtaatgtagcatcgtgatactgctgaatgatactattgattttctcatgagacatggcgataacatcgtgttcaatcggtgaatgcaacgtcatagggcttggtccatacacctttctaaaatttaaaattgcttgatttgaaaaacgaccagcatgcgctagctgaataatagcgaggctaccatgttgtttcatcgtagatgccatgttagttaatccagggatacaagcatcatggtcaatattaaagccgtattcaaacaattgaccataaggttcaatgtaagcagcgccggtgacttgcataccagctgaattagagcgacgtgcagcataagccaagtctgcctttgtaatatagccttcttttgttgatgcgtttacggtcattggtgataatacaaagcgattcgaaattttgatgccattaggtaagtggattgattgtaaaagtggtttgtatcggtacatactatgattccttttctattcaatattgttttcaaagtaccatggaaagaatgaataatcaatgatgaacagtcttgatagaatagaattggtacatggaaaacatttttaaaattaaaattaaactaatgaatggcatttgtaggtctgaaaatatgaatatgaaaaagaaaaataaaagcgaaaagatataaaagttaattgaaaaacgttatcatatacgtgggtatatgaagagggaatggtattaagaacgttaaaatgttatgtcggtttgacatgacaggataagtttggagatgacggattggttaaattaagcgtattagactatgccttaatagatgaaggtaaggatgcacaaaaggagttgcaggattcagtgacacttgcaaaattagcagatcgacttggctttaagcgaatttggtttacggaacatcataatgtaccagcgtttgcgtgtagtagtccagaacttttgatgatgcatacattggcgcagacaaatcacatacgagttggctctggtggtgtgatgttgccgcactatcgaccttataaaattgctgagcattttagaatgatggcagcgttatatccaaatcgtattgatttaggtattggtaataatcccggtactactatggtaaagcaagctttagatggaataaatcctacatatgatagttacgatgaatcgatttcgttattacgtgattatcttacaataaaggataaaccaagtgcgcatacgttaggtgtccaaccacacattgatcattttccagaaatgtggttattaagtagtagcgcaacatctgccaaaatagctgccgaactaggtatagggctttctgttggaacatttttgctaccagatataaatgcgatacatgcagcgaaggataacattgatatttacaaaaaacatttccaagcatcaacgattaaaatggacgcaaaggtgatggcatctgtatttgtcattgtagctgataatgaagcggaagtagcagcattgcaacatgccttagatgtttggttattaggtaaattacaatttgcagaatttgaacattttccatcggtagacacagcacaaaagtataagcttaatgatcgagacaaagaggtgattcaagcacatcaagcacgcatcattgcaggtacacaagaacaggttaaagcacaattagatgatttcattgctacgtttgaagttgatgaggtgttagtagcaccgcttattccaggcattgaacagcgttgtaaaacattaaaattactcgcagaaatctatttgtagcattttaaatagaagagaaaggatgaagataagatgaaaaagttagccaattatttatgggtagaaaaagtaggagatttgtatgtgtttagtatgacacctgaattgcaagatgatattgggacagtaggttatgttgaattcgtaagtccagatgaagttaaagtggatgatgaaattgtgagtatcgaagcatcgaaaacggtcattgatgtgcaaacgccattgtcaggaacgattattgagcgaaatacaaaagcggaagaagaaccgacaattttaaattctgaaaaaccagaagaaaattggttgttcaaattggatgatgtcgataaagaagcattcctggcattaccggaggcttaaatggaaacattaaaatcaaataaagcgagacttgaatatttaatcaatgatatgcgtcgagagagaaatgacaatgacgtattggtaatgccatcttcatttgaagatttgtgggaattatatcgaggcttagcaaatgtcagaccggcattacctgtaagtgatgaatatttagctgtacaagatgctatgttaagtgatttgaatcgtcaacatgctacggatttgaaggatttgaagccgattaaaggtgacaatatctttgtttggcaaggtgatatcacgacgttaaaaatcgatgctattgttaatgctgcaaatagtcgttttctaggatgtatgcaagctaatcatgactgcattgataatattattcatacaaaagcgggtgttcaagttcgacttgattgtgcagagattattcgacaacaagggcgcaatgaaggtgtaggtaaagccaaaataacacgtggatataatttgccagcaaagtatataattcatacggttggtccgcaaatacgtcgattgcctgtttcaaagatgaatcaggacttgttagctaaatgctatttgagttgtcttaagcttgctgatcaacatagtttaaatcatgtcgctttttgctgtatatctacaggtgtatttgcttttcctcaagatgaagcagcagaaattgctattcgaacagtagaaagctatctcaaagaaacaaattcaacattgaaagtcgtgttcaatgtatttacagataaggatttacaactgtataaggaggcattgaaccgtgatgcagagtagtaaatggaatgcaatgtctcttttaatggatgacaagacaaagcaggctgaagtattgcgtactgcgattgatgaagcagatgcgatagtgattggaattggtgcaggcatgtctgcatctgacggatttacatatgtaggagagcgttttacggaaaatttcccagatttcattgaaaaatatcgcttttttgatatgttgcaagcgagtttacatccttatggcagttggcaagagtattgggcatttgagagtcgttttattacattaaactatttagatcaacctgtaggtcagtcttatctcgcattaaaatccttagtggaaggtaaacagtaccatatcataactacgaatgcagacaatgctttcgatgctgctgaatatgatatgactcatgtatttcatatacaaggggagtatatactgcaacagtgtagtcagcattgtcatgctcaaacgtatcgcaatgatgatttaattcgtaaaatggttgttgcgcaacaagatatgcttataccttgggagatgattccgagatgtccaaaatgtgatgccccaatggaagtgaataaacgtaaagcggaagttggcatggttgaagatgctgaatttcatgcgcaactacaacgttataatgcttttctagagcaacatcaagatgataaagtgttgtatttggaaattggaattggttatactacaccacaatttgtgaagcatccttttcagcgtatgacacgtaaaaatgaaaatgccctttatatgacgatgaataaaaaagcatatcgcattccgaattcaattcaagaacgtaccatacatttgactgatgatatctcaacattgattacagtagcactccggaacgacagcacaacgaaaaataacaacattggagagacagaagatgtacttaatagaaccgattagaaatggagaatatattactgatggtgcgattgcactcgctatgcaagtttatgttaaccagaatatctttttagatgaagatattttatttccttattattgtgatccaaaagtggaaattggacgttttcaaaatactgctatagaagtgaatcaagattatatagataaacacagtattcaagtagttcgccgagatactggtggtggcgctgtgtatgttgataaaggtgccgttaatatgtgttgtattttagaacaagacacttcaatttatggtgattttcaacgattttatcaaccagctataaaggcgttgcatgcattaggtgcgacagatgtgatacaaagcggtagaaatgatttaacattgaatggtaaaaaagtgtcaggcgccgcaatgacattaatgaacaatcgtatttatggcggttattcgctattacttgatgttaattatgaagcaatggataaagtgttaaagcctaatcgcaaaaagattgcatcgaaagggattaaatctgtgcgtgcacgtgttggtcatcttagagaagcactggatgaaaagtatcgtgatataaccattgaagaatttaaaaatttaatggtgacgcagattttgggaatcgatgacattaaagaggcaaaacgatacgaattatctgatgaagattgggaatcgattgaagaattggcgagtaaaaagtataaaaattgggattggaattatgggaagtcacccaaatatgaatataatcgaagtgaaagattatcatcaggtactgtagatattaccatttctgttgaacaaaatcgtattgcagattgtagaatttttggtgatttctttggacaaggtgacataaaagatgtggaacaagcattacaaggaacaaaaatgacaagagaagatttaacgcatcagttaaagcaattagacatcgtttattattttggtaatgttacggtggaatcattggttgagatgattttaagttaattttgtttaggcgttaatgtcgcaccctcgttaaacattatttaatataatacaaaaacaccgtccataagtaagtggctttcctcttgataaaaggggcattcactcaatatgtgacggtgttttatatttttacgttagcactattgctgtggcttttgacgaccttttaataaaattgctgtcgcacctacgataataataaatagaatcgcaccaaataatcccatatattttactgcgttaccgaacacgataccgacagctaaaaagtctgtatctgagaaagttgttgcagcaccacctaattcgcctaaaaatggcaagaataataatggtaaaaacgttattaggataccatttagagcggcgccagcaacagcacctttaataccgcctcttgcattaccgaatacagcagccgttgcacctaagaagaagtgtgcaactacgccaggtaaaatgacgacgccaccaaataagaataagataaacataccgatgacaccggtaataaagctgacaaagaatccaattagtactgcattttgtgcataagggaacacaatagggcagtctaatgcaggtttagaatttggtacaagcttttcagaaatgcctttaaatgctgggacgatttcagctaagattaagcgaacgcccgttaaaataatgaatacaccagcagcaaatgtcacgccttgaattaatgaaaagacaataaagttttgaccatcactaatagattcgtgtacataactaacgcccgcaaataagcatgcgatgaagtaaagtaatgccatcgtaatcgagatactaattgtactttctcgcaagaaacttaatccttttggaaatttaatctcttccgttgatttagacttacctttgaataattgacctacagcacctgcggcaaagtaactgattgagccgaaatgacctaacgctacttgatcattccctgtaatttttcgcatcgtaggttggagtaatgcaggtaagactgccatgattaatcctaatacgagtgcgccgataacaatcgttagccagcctttaatatgactgactgttaaaatgattgctaaaaacgcagccatgtaaaatgtatgatgacctgttaaaaagatatattttaaattagtgaagcgggcaattaaaatattaacaatcatgccacagaccatgatgagtgcagctgttgttccaaaatcttttaaggctagtgagacgatagcttcgttattaggtacgataccttgcacaccgaatgcgtgttggaatattttgccgaatggctcaagagatcgaacgacgacatcagcacctgcacttaaaattaagaagcctaatatcgttttaatggttcctgaagtgattgttgcggcagtttttttctgaacgattaaacctataaaggcaatcagtgcaacaagaatggctggttgacttaaaatatcgactataaaattaaggattgcttgcataggtcgtacctcctttaaatcatgttaagttgttgtaatttttctgcgagcttttgttgtaattcagctttgtctaaaatattatcaagaactaagacatcccctagacgttcggcattttcagctaaatctctaccacaaataaacaagtcagccatctctggacttgctgtcataatgtcactatgttcaacttcgatatcagatggtgcattaagttgcctaagtgcttcttgtgcgttcatttctaccataaaactacttcctaaaccgtggccacatactactaaaattttcatattaatcatgctcctttaaaatgtttttaatgtcttgtgcgtttgttgcagttaatagttgctggactgtttggttatcgcccagtacggttgctaaattttgtaatacagataagtgtgaatgattgtcgatggcactcaatacaaaaatgagtgatgcgtagtgatcttcatcacaaaatgccacatgttgattcaactttaatagacttaaaccaacttgatgtacgtcattgtttggtcttgcatgtgcaattgcaatttcaggtgcgataacgatataaggtccaagctcattaacgctatcaatcattgcttgaacatagccttgttcaataatttgttcttgtagtaatggctgagaagctatagttatagcttcagtccaatcatttacttgttcttttacaatgatgcgtgttgttgacaaaatgtctaatgacacgttattaagcctcctttgtcatagttaaagcaatgtgttgtttaattttaaaaatattcccatctaagaaatcttgtcgatataagtcgttgcttaagcattcgcttaactgtcccaatgcctttaaatgtgcattggggtggtctgttgctaatgtaattacaaggtgaacgggatcgttagctttactaccaaaaataatcccttcagtgaaataagttagtgtgaaacctacaccattctgtacataatcagtaccagcgtgaataagtgcaatatgtggactaatgaccatatatgacccgaattgttctaattgttttaaaattgcagctgtataatttgaattgacaatgccatcattgattaaaggttgcacagccactgtaattgccgattcaattgataatggttgtttatttattatgatgcgatgttcaggcaataaatctgcgagtgacttgccatcagttgccattttcatgactcgttgttctcttgagtcattgataatttgattcaatttttgacgagattgctggttgataaatggatcgacatgaataactggtacagctgagatttcacaaggtactgttgaaatgacataatcaatgttatcttgcaataatcgactttcttccaattgataaatggagtaggcatcccaaatgtgaaactcaggatacagatgatttagttttgattttaaaagttgcgacgtgcctataccagaaccacatagtaagacaaccttaatcattgattgtttatgtgttgcaacacgctctatacttgatgcgaaatgaattgtaatgtatgttaattcatcttcgttgaagcgaatagcagcatcttgttcaattgggctaatatgcttgctaacggcttcaatgatttgaggatagcgacgcataacttcttgcctcaaaggattaggttgtagcatatcgtatttaatacgatgtatagctggtttgatatgtgtgatcagactggtatgcaacttgttgtcttttgacatgtcaatgcctaattcttggctaacacaagtgatcaattcatgtatattttgcgataaatcatggtattcaaaggtaattgaagatgctgtatgttcggtcattttagagcctagtaaatgtaacgtgataaagataatttcagactctggaaatgtgacattacaactgcgttctaagttttctatcagttttgaagcaatagcatactgattagtatgtcgccatttatcaatttcattgataggtatatcgaacgaaaaattttcatttaaacgctgaatggcaatgagtatatgatagattaagccatcgatagccgactgaactaattgataattttcactatttaatgtcttaataatggcacggcgaaccaatgcgatagattctgaattaaagatatcagcctctataaaaggtgcagcttgtttcatatattgatgtataaagtgtgcatacgctttacgataatgatcttcctcaccaataatattgaatcctttattgtggacataatttaactttaaatggtattgatctagttgggcttgaatcattttaatatcatctgcaattgtccgacgcgaaacattaacatcttgtgcaagttgctttgttgaaacaggatcagttgtttcgaataactttaaagcgatatgtgtgagtcgctcatcttttgaaaaatgaatttgattcgttagattgtgctctaattcatttaatatcgttgtgttagctgttgttactttgatgcctgcagctttattacggctgacttggtaatgataagtttcagcatattgctcaatatatgctatatcatattgaatggtacgaggtgatacaccaagttgattagcaatggtattgattggaataaacgtttgctcatgaattaaaagatacaaaatttcgatttgtctataacttaacaacgtaatatcctcctgtttgtaattgtaagcgatttcttaaaaacgtagatatgcaatctctttcatattttaatccgaaaaattgcatatcaaaatgtttatggcgcaagattttataggaacttttaaaataaattagattttcatgttgacaatttaaaaatgtcgcagtatatttagttagacatctaacgaaatggtggtgcaataaatggaattcacttattcgtatttatttagaatgattagtcatgagatgaaacaaaaggctgatcaaaagttagagcaatttgatattacaaatgagcaaggtcatacgttaggttatctttatgcacatcaacaagatggactgacacaaaatgatattgctaaagcattacaacgaacaggtccaactgtcagtaatttattaaggaaccttgaacgtaaaaagttgatttatcgctatgtcgatgcacaagatacgagaagaaagaatataggactgactacctctgggattaaacttgtagaagcattcacttcgatatttgatgaaatggagcaaacactcgtatcgcagttatctgaagaagaaaatgaacaaatgaaagcaaacttaacgaaaatgttatctagtttacaataaatggtaagcgtgactggtagaaatcagtcactttatctttaatgttatagttagatatctaattgttagtgagctaattattgaaaaagacaaggagtattgaacaatgaaagacgaacaattatattattttgagaaatcgccagtatttaaagcgatgatgcatttctcattgccaatgatgatagggactttattaagcgttatttatggcatattaaatatttactttataggatttttagaagatagccacatgatttctgctatctcactaacactgccagtatttgctatcttaatggggttgggtaatttatttggcgttggtgcaggaacttatatttcacgtttattaggtgcgaaagactatagtaagagtaaatttgtaagtagtttctctatttatggtggtattgcactaggacttatcgtaattttagttgctttaccattcagtgatcaaatcgcagcaattttaggggctagaggtgaaacgttagctttaacaagtaattatttgaaagtaatgtttttaagtgcgccttttgtaattttattcttcatattagaacaatttgcacgtgcaattggggcaccaatgatttctatgattggtatgctagctagtgtaggcttaaatattattttagatccaattttaatttttggttttgatttaaacgttgttggtgcagctttgggtactgcaatcagtaatgttgctgctgctctgttctttatcgtttattttatgaaaaatagtgacgttgtgtcagttaatattaaacttgcgaaacctaataaagaaatgctttctgaaatctttaaaataggtattcctgcatttttaatgagtatcttaatgggattcacaggattagttttaaatttatttttagcacattatggaaacttcgtgattgcaagttatggtatctcatttagacttgtgcaatttccagaacttattatcatgggattatgtgaaggtgttgtaccattaattgcatataactttatgtcaaataaaggtcgtatgaaagacgttatcaaagcagttatcatgtctatcggcgttatctttgttgtatgtatgattgctgtatttacaattggtcatcatatggtcggactatttactactgatcaagccatcgttgagatggcgacatttattttgaaagtaacaatgacatcattattattaaatggtataggtttcttgtttactggtatgcttcaagcaactggtcaaggtcgcggtgctacaattatggccattttacaaggtgtggttatcattccagtactatttattatgaatgctttgtttggactaacaggtgtcatttggtcattattaattgctgagtcactttgtgctttagcagcaatgttaatcgtctatttattacgtgatcgtttgacagttgatacatctgaattaatagaaggttaaatatttcgtacacttctggctgagtatatttcggtcggaagtgtatttttcaaataaaaaataaatatatgatacgattatgaaaaaataaagtgagaatggcatatgtataaatctaaaatactgttgaaatatatttttagtgaagaatcagaagttaaagatttaactgaagaaaaatataatcaagattacgaagcattaacatttagctttaaagaggaaacatatcaaagtaggttagctaagaaaacaccgactaaagcagggtattttgttacatgttggacaaaagacgagaacaattgtaatcaaccatactcaaaagaggcatttgcagattacttaatgattatagttattgatgaagaattaagcggttattttttatttcctagggaattattgatagaaaaaggtatcttaactacatttgaacataaaggtaagatggcttttagagtttatcctaagtggtgtaatcaattgaataaaagagcagagcaaacacaaaagtggcaatgtaaatattttttgaatactaattaaaaagtcatatggttgaacttataagagatgaatatatcatctttcgataagataaccatatgactttattttttatcatttaatgatgaacggtttcttgtcctactttattccaagtgaggataaagctcaacattgcaaacacactgattgctgttaataaaataaaaccgacatcccatccgaatttatcaactacagcacctaagacgatgttggccattacagcaccaaacagataaccaaataatcctgttaatccagctgctgtgccagctgcttttttaggtacataatctaatgcttgtaaaccaattaacataactggtccatatattaagaaaccaatggcaattaatgagacattgtctaaccaagcattgcctggaggatttaaccaataaattaatacaaatactgtgacacctaacataaagaagaaacctgcaggtccacgacgacctttgaataatttatcagaaatgtaaccacataataatgtaccaggaattccagcccattcgtataagaagtatgcccaacctgatgcttttaagtcgaaatgtttttcttcacttaagtagactggcgcccaatcaagtacaccataacgcacgaaataaacaaatatatttgcaaaggcaattgcccatacccatttattgttcagtacatatttaaataaaatttcttttgtagttaattctgtttctaatgttttcttatcgcttgtagcaaagtcatttttataaatttcgattggaggtaaaccttgagattgaggtgtgtctctaatcaatacgtatgaaattgcggcaatgataagtgctaagagtgcagggtaaatgaatacaccttcgaaaccttttaaataaccaaagttgataaatgctgttgttgtaataccccaagcagcaataggtgccataatacctccaccaacattatgcgcaacgttccaaagggcagtcttacttccgcgttcacttacactaaaccagtgaacgagaacacggcctgaaggtggccagcccataccttgaaaccatccatttaagaataataggacaaacataataccgatacctgatgtaaagaacggtacaaatcccattaacaaattgacgatagcagtgagtactaatccaagaactaagaatatccgagcattgctccgatcacttacagtacccataaagaacttactaaatccatatgcgatggaaacagcagaaagtgcaaaacctagttccgcttttgtaaaaccttgctcttgcaatgccggcatcgctaatgaaaagtttttacgtaataaatagtacccagcgtaaccgatgaaaataccaagaaatacttggagacgtaatcgtttataggtatcatctatctgattttctggcaaaggcttaatatgctttgcaggtttaagaaaattcataaaatcctccttaatatgtatttatatgcattttgtgcgataaacttatattagacatgtatgaaagcgttgtcaatatacttttgtgaaatcttgaagatttagtttttgaagtattttataaacgtttagaaaaaataaattgccacacataaatttataattatgcaattattatggcgttttacatactagctgtgtatctacgaatgagtgcaaacatatttttatttgcagaaaaggggtaaatggcatataactatcttttttatgtaagttggtataaaatttatactaataggagggatagtatgaatatagtagggcatcatcacatatccatgtatacaaaagatgcaaaacgtaataaggatttttacacaaatgtccttggattacgattggttgaaaagtcggttaatcaagacaatccttcaatgtatcatttgttttatggggacgaagtaggtacagccggaacaattttaagcttttttgaaattcccaatgcgggtcataagcagccaggtactgaaacgatttatcgattttcattattagtaccaaatcaagcggcacttcattattttgaaaaacgtcttgagaataatggtattaagtctgaacatttgtactatcttggacaagaaggtgttgtttttaaagatgaagacgacttagaaatcatactgcttgttaatgatagttttgaagtaccacatcaatggcaacataacgcttatagtgaaatacctcaagcatatcaaattttaggaatagggccagtagaattaagagttagaaatgcagcgcgtacggtagaatttttggaaaatgtcttaggttatcgcaaaagagataataaatcattcgatgtgctgacattagcaccacaaggtttatattcggattttgtagttattgagcaacagggacaacgtgaaagacctggacgaggttatatccatcatattgcagttaatacaccacaaatgagtgacttagatgtaatttacaagaaattacaacaacaaccacaaagtaattcgggtataattgatcgctatttctttaaatcattatactatcgccataattcaattatgtatgaatttgcgactgaagcgcctggatttactattgatacacctgttgaacaattaggaagtcaattgaacttgcccgactttttagaagcagaacgtgaacaaattgaaagtaagttacacgaaatataaaggagaatgtttaatggcaaaattagaaatgaataaaaatacgcctcttgagtttggtttgtattccttaggtgatcatttattgaatccatttaaaggtgaaaaagttagttatgagcaacgtattaatgaaattattgaagcaagtaaattagcagatgaagcgggtattgatgtttttgcagttggtgaaagtcatcaggagcattttacaacacaggcacatacggttgtgttaggtgcaattgcccaagcgacaaagcatattaaagtttcaagttcttcaacgattattagtgcaacagatcctgtaagagtatttgaagacttcgcgacattagatttgatttctcatggtagagccgaaattgtggctggtagagcatcaagaacaggtatttttgatttgtttggctatgatttaaaagactatgatgaattgtttgaagaaaaattaggtttacttttagagttaaataaaactgaacgtattacttggtctggaaaatatcgtccagaacttagaaatatgaaaatattcccaagaccaatcgataatacattgccaatatggcgtgctgttggtggtccacctgcaagtgctatcaaagcggggaaacaaggtgtgccaatgatgattacaacccttggtggcccagcaatgaactttaaagattctatagatgcttatcgtcaagcagcaactgaagcaggtttcgatgcttcgcccaagtctttaccagtaagtacagcgagtctgttttatacagctgaaacaactcaggatgctatgagagaattttatccacatttgaatacagggatgtcatttattcgtggcgttggttatccgaaacagcaatttgctaattcaccagattatagagaagcgctaatggttggaagcccgcaacaaattattgaaaagatattgtatcaacacgagttgtatggtcatcaacgttttatggcacagcttgattttggcggtgtgccatttgaaaatgtaatgaagaatatagagttaattggcaacgacattataccggcgattaaaaagcatttatcaaaataggaggggcgtcatcatgaatattgtattattgtcaggttccacagtaggttctaaaacgagaattgctatggatgatttaaaaaatgaactagaagtcatcaatgagggacaccaaatagaattgatggatttacgagatctcgaattagaatttagtgttggaaagaattatctagatactacaggagatgtatataaattaacgacgtctttaatgcaggctgatgtgatttttattggttttccaatttttcaagcttccatccctggtgctttgaaaaatgtgtttgatttacttccagtcaatgcgtttcgtgataaggtaataggacttgtagcgacagcaggttctagtaaacattatttaattcctgaaatgcatttaaaaccaatattgagttacatgaaagcacatacgatgcaaacgtatgtatttattgaagagaaagatttttcaaatcaacaaattgtcaatgatgatgttgtatttcgtttgaaagcgttggcacaatccacaatgcgaactgctaaagtacaacaacaagtgcttgaagaagaaaacaaccaatacgacttttaaagtataaaaataagacgctcggcacactatatttgtaagtgtttgagcgtctttttatattaactatatagccagtgaacgacgataaaggcaagtgatgacaagcatattgaggtaataatgattgtcataagcggtttaagtgcgcgatttttaagatctttaaaagcaacatttaaccctaaagcaaccatggccattaataagcaaattgttgatacggtatttaaaatatttagcaatgctgatggaatagttacatatgtattcactaaggccataatgacaaatccaattaaaaagtatggaatgcttattcgacccttgctagatgattctgatgaacggaaacgcataattaaaataagtacgatggttaatggaatcagtaagaatactctaccaagtttaccaagaagtgcgattttaagtgcatcactaccaccaaagccaccagctaagacaacgtgtgcaatttcatgaagactaacgccggaccaagcgccataaacatttgtcgtcattgaaaagatagcgtagatagctgtatatataagtgaaaatatcgtaccaatcaatgcgatgataccgatactaatagctgtatccttttcacgtgatttgaatattggagctactgcagcaatagcggcagcaccacaaacgcctgtacctacacctagtaataatgcgatgtttttgtcaccatgcaacagtttgttgacaaagagcatcattacaatactgaaaataacgacacctacatcgatggctaatagtctactaccttgaccgataatatcgaatatattgagtttaagtccatataggatgattgcaaatcttaataaatatttagatgaaaacgtaatacctgagctatattgttcaggatatcctctaaagtgacgatatagaatagcgattaatatcgcgatagttaatgcgccaaccttatctaagattggcaatttagctgctaaaaagctaaataatgcgactataaatgttaatgatagtccaatcataaaatgcttatttttcaatgatgccatgagcagtgcctcctttaatagcattttagcactgttttgtcgtatttttaaatataaatttggaatgaataataaaatggtatttaaattgagttgtgtgatacggaatagggtgatgtgtaagaagcgctacataataaatcattagtgggtctttatcaattctatttcactcccttagttgatagaaaacaaatttaatatgcaaggtgaaataacaatatgttattatagtgataatttacagaattatatgaaaaatgaatgaggatgtgatggtatgtttggaatgaaagtgaatgaactaataagattaaaaattttagaggcccatgacacagaggcacttttcaatttagtcaatcgttcaagagattcacttagggaatggttaccttgggtagatgcaactgagcagccatcagatacgcatgcgtttattaaaagaggacttttgcaatttgctgatggtaatggatttcagtgtggtatttggtatgagggaacgctagttggtgtcataggtttacatgaaattaatcacatgcacagaaaaacttcattagggtattatttagataaacaatatgagggtcatgggattatgacgcaagcagttgaggcattgataaagtattgcttcgaagagattgacttaaaccgaattgagattagtgccgcagttaataatgaaaaaagccaagctattcctgaaagactgggatttactagagaaggtatgttacgtgacaatgaattactaaatggtatttattcatcgagttacatctatagtttattaaaatcagaatataatgaaggatgataaatcagactacaaaagagtaatgacttacatataagtgttactcttttatttattttcaaactaaaaaggttgttgacagtattattttataacaatataatgattttgataattattatcaactagataatgttcgtgggaggatgccttaaaatcatcattttaagagccacgtattatcttggcatttagggagtgtgagatagtacgaatgagggcatgtctatgtggataatagaatttctataatgaggtgtcaaaatgaaaaagttaacaacgctattattagcatcaacgttattaattgctgcatgtgggaacgacgatagtaagaaggatgattcaaagacatcgaaaaaagatgatggtgttaaagcgattgaaaataatgatatggcccaagcaaaagcgttatatccaaaagttcgcatgtattatgaacgctctgaaccagttgcagaagcatttggagatttagatcctaaaattgatgcacgtcttgcagatatgaaagaagagaaaaaggaaaaagaatggtcaggatatcataagattgaaaaagcattatacgaagataagaaaattgatgatatgactaaaaaagatgcacaacaattattgaaagatgcaaaagaattgcatgccaaagctgatacattagatatcacaccaaaattaatgttgcaaggttctgttgacctattaaatgaagttgcaacttctaaaatcacaggtgaagaagaaatttattcacatacagatttatatgattttaaagcgaacgttgaaggcgcacaaaaaatttatgacttatttaaacctattttagagaaaaaagataaaaaattaagtgatgatattcaaatgaacttcgataaagtgaatcaattattggataagtataaagataacaacggcggttatgagtcatttgaaaaagtatctaagaaagaccgtaaagcatttgcggatgctgttaatgcattaggagagccactaagtaaaatggctgtgattactgaatgacaaattatgaacaagttaacgatagtacgcaattttcaagacgtacatttttgaaaatgttaggtattggcggtgccggtgttgcaattggcgcaagtggtgttggtagcatgtggtctttcaaatcaatgttcaatacaccagaagatccggaaaaagatgcgtatgaattttatggtaaagtgcaaccaggcattaccacaccaacgcaaaaaacatgcaatttcgttgcgttagatttgaagtcaaaagatagagatgcaattaaggcaatgtttaaaaagtggacgcttatggctgatcgtatgatggatggtgatacagttggcaagacgagtaacaatcctttaatgccaccagtagataccggtgaatcgataggattaggtgcaagcaagttaacgattacctttgggattagtaagtctttgatgaagaaaattgggttatctagtaaaattcccgatgcctttaaagatttaccgcattttccgaatgatcagttaatagacgattacagcgatggtgatattatgattcaagcatgctcaaatgattcgcaagtatcctttcatgcggttcataatttagttcgtccatttcgagatattgttaaggtacgttgggcgcaatctggttttatctctgctaaaggtaaggaaacacctagaaatttaatggcatttaaagatggaacaattaatcctagaaagagtaatcaacttaaagattatgtgtttattgatgacggatgggcgaaacatggaacttattgtgttgtcagacgtattcaaatacacattgaaacgtgggatcgtactgcactggaagaacaagaggctacatttggtcgcaagcgacatagtggtgcaccgttaacaggtgggaaagagtttgatgaaattgacttaaaagcgaaagatagtcatggcgagtatattattgataaagatgcccatacgagactagcgaaagaagcaaatacgtcaattttacgtagagcctttaattatgttgatggtacggatgaccgcacaggtaactttgaaacaggcttgttgttcattgcttttcaaaaagcgacccaacaatttatcggtattcaaaacaatttaggtagtaatgataagttaaatgaatatattacacatagaggttctgcttcatttatagtattaccaggtgttagtaagggaggataccttggtgaaacattatttgactaaaattatagcaatgctaattactgctgctatggtgtgtaactttgggttattgaaaagtcaggcagcagaacaacaaagtattagtgatgtatatagtgtgataacggattcgaaatctgcactttctaataattcgatatcgaatgacaataagcagaaagcaattgagcaagtggtaagtgcagttaagaaattatcgcttgaagataatagcgaaggtaatgctgtcaaatcaaatgtgagaaagcttgaagatgcaaaagcgaatgataatcaaaaagatacactttcgcaattaacgaagtcattaattgcttatgaagagaaattggctagtaaagatgcgggttctaaaattaaactattacaacagcaagtcgatgccaaagatgctgcgatgacaaaagcgattaaagacaaaaataaagcggaattagaatctttgaacaatagtttgaatcagatttggactagtaatgaaacagtgattcgcaattatgacgtaaatcaatatggacaaattgaagtcgcattattacaacttagaattgcaattcataagtcaccattagatacggcaaaagtgtcacatgcttggacaacttttaaatcaaatattgatcatgtcgataaaaaaaagtggtacgtctgcaaatgatcaataccatgtatcacaattaaatgatgagttagagaaggcgattaaagctatcgacaacaatcaattgtcggatgctgatgctgcgcttacacattttatagaaatttggccgtatgttgaagggcaaattcaaactaaagacggtgctttgtatacgaaaattgaagataaaataccatattatcaaagtgtattagacgaacataataaagcacatgtgaaagatggcttagtagaattaaataaccaaattaaagaggttgttggccatagttatagcttcgtcgatgtgatgattatctttttacgtgaaggactagaagtgttattaattgtaatgacattgactactatgacgcgtaatgtcaaagataagaagggtactgcaagtgtaattggtggtgcaattgccggacttgtattgagtatcgttttagcaattacattcgtagaaacactagggaatagcggtatgcttcgtgagagtatggaagcgggattaggtatcgttgcggtcatattaatgtttatcgttggtgtttggatgcataaacgttcgaatgcgaaacgctggaatgatatgattaaaaatatgtatgccaatgcgattagtaatggtaatttggtattgttagcgacgattggtttaatatctgtgttgcgtgaaggtgttgaggttatcattttctatatgggaatgataggcgaattagcgaccaaagattttgtcataggtatcgccttggccatcgtgatattaattgtctttgcgctattatttagatttatcgtcagattgatacctatattttatatatttagagtattgtcgatctttatttttattatgggattcaaaatgcttggcgtaagtattcaaaaattacaattattaggtgtgatgccaagacatgttattgaaggattcccaacgattaactggttgggcttctatccaagttatgaaccattaatagcacaagctgcctatattatggtagttgctatcttaatctttaaatttaaaaaataaaaaacaggccgagtgcctgtttttttgttgctgtatggcggattatcgtagcattgcagatatcgcggcattgttggttctcgttgcattgcagagatgtagatatcacggtttaatccgatgctgtattctgattaacgcaatgttagttagctgcagtattgatataatctgaggtgctacattgttcttttattggctattgtgatgttgttgcattgtaagtattgcagtattgattcgtataaggtcattgcgttggtggttcaccgcggcatgtgaatttaacgatgaacatactgaactcaaagagcaatatgagtggcaatgtgagtaatatatttaatgttatgtctggtggtgcaatgatactcgccagcacaaagcaagcaaaataaatatatttacgataatgtttcaaagaatatgtatctataagaccgaattttgcaagacccataaataatattggtaattgaaatagaatgccaaatgtaaataaccaacgtatgagttcaatcaaatatgctttaaagccaatgacaggcgaaatgtttaaagttaatgataattttaacgcgaattgaatgatcattggaaagccaacataaaatgcaaaagcgacgccagcacagaataataacacgctgaaaaaactatatttataaataaattgacgttcattattatgtaatccaggcgcaatgaatgcccacaattgataaaacatgactggtgaaatgaaacaaaacgcgatgaaaaatataatcatcacgtatatttggatcatttctgtgaatgaaaatgcatgtaaggacacatgtgcacgggtaatatacgttatgaatggtgtcatccaccaaaatgatgaaacatatacgacgatgaccgtaatgccgaacgacaataaaatttttactaaccgttggcgtagttcgctaaagtgaaccattaatgtatcatcagtactattgctctcgctgttgcttcgattccttactgggtgtatcgtgagactctttatctaaatcttctgttgcagatttaaattcttttaaagtagaaccgatagcacgaccaaattgtggtaattttttcggaccaaaaataattaaagcgataatgctaatgacgacaagacttgttgggcctgtgatgcctaaaataaaagtgttagttatcatgataatcaacctcactcataagtagtatatagtatttactttataccgaacgataatgattatcaacaatattttatataataattaaaatattgctataaacacattttactgaggtattaattctgaaatgatagcttgttctttcaagtcgatataagtacaagtaccagcttgaatatcgatatgccatttataaataccagcttcagccatttcatcacaaaatgtttcgaaatctgtttgtccttgttgatgtctagttaatacatcttgaacgatagattgatttgaacttggagcgacaggatgattactttttacagatgaagtaacaatatcatcttctgattgatgtacgtatgttgcagtgccatcttgaatattaacaatattgtacgtcatacccatatccttaaattctttgaatagttttggaaaatcgacaccagtatattgttgatgtgcttgttggatttcagataatgtaaatgccataatagtctcctttgaatggtttgatttagtgaaaatgcgtgcatcatactaaaattagaatgctgttaattatgcaggaaggtgtaacgaatgtaaacaattatgacttgtaggcgttgaggtgtttgtttcaaaatgtcatacataggtggacatttatatttttttgtgtctttttgacaaatatagttgtcaaaaagacaaatatcatttacagtaggattaaggagttgatgcgatgtgcgtaatcgattgaaagagttacgagcacgagatggcttaaatcaaacgcagcttgccaaactagctggtgtttcaagacaaaccatttctctaattgagcgaaacaattttatgccatcagtattaacggcaataaagattgctcgtatcttcaatgaaacggtggaaactatttttattattgaggaggatgaggcatgaaaatactaagatatatcggatatcttttactgggtggacttgtaggaggtatcataggtggaattttaggtaactttgatggattgggtattgagaacttgacgtttgcgacatataacaatgtcgttgtaatatcgattgttgcgactattattatcatattggtagaagccattgttttgatgaatcaaaaacgtgcattgaagtataagcgacttgtagatgaagaggtagatatcgatgcaacagatcaatatgagttgcttgcgaatcgttatgttttaaatggaagtatattaagtattctgcagacagttattgcttttttagtattgcttatttttgtggtagggcatgctgaagcagatgcaatactattctttttaataccattttttgctagtgctattttcaatacacaatttacgctgtttaatagaagatttgatgatagaatgccaaaaattgcagataagaattacactgaaaagcgattggaaatattggatgaaggtgaacgccatatagaattaattgcattatttaaaacatatgtgatcaacttatccatattgatactagccattatttttatagggtcttattcaattgctacaggaattaatcaaagctttagtttgctacttatcattgctattttcatatataacgcctttagttatttattgaagagaagacgtttttattaaaattaaacaaagaggagcatggatatgacaacattgttaaacgtagatcgtgtgaacaaacaatacaaagattcggaatttaaattacaagatgcatctttaacgattgctactaatgagacagtaggattaatcgggaaaaatggctcaggtaaatcgacattaattaatattctagtaggtaatcgacataaagataacggtagtatcacattttttggggaagagcatgctgcgggtgatgtcgaatataaagaacacataggtgttgtgtttgatgatttgagagtacctaataaattgactattaaagatatagataaagtatttcaatctatttatacgacttggaatagtcaaaaattctttgatttaatcaaatatttcgagttgccactacaaactaaaattaaaactttttcaagagggatgcgaatgaagatagctttgacgattgcgctttctcatgatgtgaagctattgatcttagatgaagcaactgcgggtatggatgtttctggacgagaagaagtaatggaactattagaagattttgtcgcgcaaggtggaggcatcttaatatcatcgcatatttctgaagatatagaacaattagcggataaattagtgtttatgaaagatggacgaatgattttaactgaacagaaagatatacttttagcacaatatggaattgttacgacagaagataaagatgttgaaattcctaagcatttaattatagcttctagattgtcaaaggggaaatatcaaattttagttaaagattatgcagaaattgaaaatgcagaacctttaaaacacattgatgacgctacgaaaatcataatgcgaggtgaagtataatgaaaggtatgttcctaagtagtttttatgcaacgagaaagcaaacatatatttattttatagtcgctatcatagctgcgggatactttgcagtgtttaatccgttgatgagttcggcaatggctggggttatgttaatcacacctattactgataatattaaacatgaaaaagactcaagatggatgtattatgtatctactttaccggttaaacgtagtgattatattaagtcatactttgccttttatttaatcttattcggtgcaagtttaatgattggattagttgtgactacgatcgtgacccaaagtgtgatgattggtattatgtcaggtttaatgagttttggtatcataggggcatactctatcattttcccattgacatttaaatttggcgctgaaaactctaatgtcattatgatatttgcatctatactactacttttttctttcgtggtctttttctttatatatggtatggttagtggtgcatctgcattagaatttgaaaaaattagcactgaaggatggctagttgtcatagcatatgcggtcattggtatagttataacgagcgtttcttatatattgtctattaaaatttttaacaaacaagaactataatcaatattcttggtgtgaagctagtcattgaaataatatttagggagtgggacagaaatgatattttcgcaaaatttatttcgtcgtcccaccccggcaaggttgactagaattgaaaaaagcttgttacaagcgcattttcgttcagtcaactactgccaatataactttgtagagcattgaacattgatttatgtctcaggctctttttggtgttgtggaatgaaatgcgggatgataggttgaggtgacatctctatatcatatcatttgtttttagaagattaggttgtgtgggaattgtatccttttatagtgaggattaacgtgtatatattattgagtatgttgctgaaatttatttgtgtgtatcaattgatgatggtatatgccaatgatttccttggaaatataaaaactcgatcatgtatcataactgatgattgtctcaaaagtatactgtgaagcacaatatttttggatgcagttcaaatacattgatcgagattaatgttatctattcatcactttgacgtagacgttgatttttaaaatagatgagcatgatgcagaaagtcgcaacggataccgagataatcattacttggtcatgccctttaaagataaggctgatgatatatgatactacaagtatgcctagtgaagaagaaatatattttgcgtttgtcagttcattatggaaataaggcgtgattaaccataatccaatatagaatattaaaacactgatatacatcatattaatttcaaacaagtcatttagtttattgttattactaaaaacaattgcggcattaatcacacctaaagcgatattgattaataaatgcgtatacgataaacgaaaaccgatagatgacaatttatgattgatgtaattttcagtaatgatccaataaacaccgaaaagactaattaaaatcataaattggaatatataaatgtaactaaaatgatcaatgctaaatgatgacgaagctaaaccaaccagtacctcgccaaagataataattgttagtaacgaaaaacgttctactaaatgcatcatattaacaggtgataatacaagatatttctgaaatggaataagtcctgtcgctgcaatgaatacgcctaaaaatccagggatgtaatggatactttgtggtagtactaatgatagaaatgataaaaatgaaatcacaaaggctacggtcgcaaaagcttgacatgtacgcttatcgccataatctaatcctgtacgtatatgtaataaatactgtaatccgatacttaaatacataattgccacgcataagaagaatgggaagaatgtcttttcaaagtccggatataggctgttagataggaagaccatgataaacatattaaacatcataaacgagacgtctttgaatgtaacttgaccaaatcgatttgtaaaaaatgtttgatgagaccacattaaccataagaacaaactcatgacgatgtatttgaaaaataaatcagctgaaatggaaccattttgtgttgttaaaatcacatgtgcaattttttgaatggcatagacgaaaattaaatcaaagaacaactcatggaatcctgcacgcttttcagctaaatgttttggtgttaatgcattaaccataaaattttaactcctttaatatgtgtaattaatttactaagtatactatttattttttctagtgaataggggcagatttggcgatgaagtggaaggagaggtgactgcaaggtaattgcggaattaacaatcatcagcgatttaatatttgactagagacgtcatggtttgaaaaagtagatggtgaaattgatggtgaaacaagctgtgaatagcgatgcaatgatagatagtatttaattagagtcattacgcgaaatgattaatgataatttgtggtaaatcaaagcataattttgtactatagatgaggatgatagagcatatttaagagtgtgaaatgttaaagtgaaaccgtttacgttcccgattgcccaaacaaattacatcattgtataatatgatttgttaaatgcataacaagaatgaaaatgtaacatacgtagcaattggtttcataaattggatgttagtggcgtattggttcattagacgtattagtaataaaattgtatatatcataaggagatgaatatgacatgacgagagtcgtattagcagcagcatacaggacacctattggcgtttttggaggtgcgtttaaagacgtgccagcctatgatttaggtgcgactttaatagaacatattattaaagagacgggtttgaatccaagtgagattaatgaagtcatcatcggtaacgtactacaagcaggacaaggacaaaatccagcacgaattgctgctatgaaaggtggcttaccagagacagtacctgcatttacagtgaataaagtatgtggttctgggttaaagtcgattcaattagcatatcaatctattgtgactggtgaaaatgacatcgtgctagctggcggtatggagaatatgtctcaatcaccaatgcttgtcaacaacagtcgctttggttttaaaatgggacatcaatcaatggttgatagcatggtatatgatggtttaacagatgtatttaatcaatatcatatgggtattactgctgaaaatttagtagagcaatatggtatttcaagagaagaacaagatacatttgctgtaaactcacaacaaaaagcagtacgtgcacaacaaaatggtgaatttgatagtgaaatagttccagtatcgattccgcaacgtaaaggtgaaccaatcgttgtcactaaggatgaaggtgtacgtgaaaatgtatcagttgaaaaattaagtcgcttaagatcagctttcaaaaaagacggtacagttacagcaggtaatgcatcaggaatcaatgatggtgctgcgatgatgttagtcatgtcagaagacaaagctaaagaattaaatatcgaaccattggcagtgcttgatggctttggaagtcatggtgtagatccttctattatgggtattgcaccagttggcgctgttgaaaaggctttgaaacgtagtaaaaaagaattaagcgatattgatgtatttgaattaaatgaagcatttgcagcacaatcattagctgtagatcgcgaattaaaattacctcctgaaaaggtgaatgctaaaggtggtgccattgcattaggacaccctattggtgcatctggtgctagagtattagtgacattattgcatcaactgaatgatgaagtcgaaactggtttaacatcattgtgtattggtggcggtcaagctatcgctgcagttgtatcaaagtataaataataagaaaacaggttatcacaacagtattaattacatgttggcataacctgtttttatttgtttatggatttattgggtaatattagtcatttgatggtttaattgcaaatgctctaacagggaacccaggtgcatcttttggtttagggctgatagcgtaaatgatggcgccacgagttggtaattgatctaaattagttaataactcgacttggtatttatcctgaccaagaatataacgttcgccaactaaatcaccattttttacaacgtccacagatgcatcggtatcgaatgtttcatgaccaacagcttcaacacggcgttcttcaattaagtacttcaaagcatctaatccccaacccggtgcatgttgttgtccgttcgaatctttgttttcaaacgtttcaatattaggccaacgttttgaccaatcggtacgaagtgcaacaaaagtgccaggttcaatagtaccatgctctttttcccatgcttctatatgcgcacgtgttacgatgaaatcattgttgttcgctacttctgttgaaaagtctaatacaattaacggcaataccaattcttttaaatcaatgtcttctaaataacgtttgttctcgacaaagtggattggtgcatcaatgtgagtaccatattgcgttacaatattccaacgttgcacatagaaaccatgatctttaaccgtgaataaagttgaaacttcacctttttcaaactcactaaaacgtggtatttctggatcaaatgtatgcgttaaatcaacccaagttgcttgttttaaagtatttaattgttgccataaaggatattgtgtcataaaatcacccgtttttagtttattatatgataaatgctgcgattattcttgacgtttagctttaacagcattcacaagtacagtcaatgcatctttaacttcttcttcttttcgcgttttcaatccacagtcagggtttacccagaataatgagcggtcgatttgttgtagtgaacgattgattgctgtagtaatttcttcttttgttggaatacgtggactatgaatatcatatacacctagaccaatacctaaatcataattaatatcttcaaagtctttaattaaatcaccatggctacgagatgtttcaattgaaataacatcagcatctaagtcatgaatagcatgaatgatttgaccgaattgagaataacacatatgtgtatggatttgagtttcatcacgaactgaagacgttgcaagtttaaatgataaaacagcatctttaagatattgttcgtgatattcagagcgtaatggtaagccttcacgtaatgcaggttcgtcaacttggataactttgattcctgcagcttcaagtgctaatacttcttcgttgattgctaaagcaatttgatcttgaacaactttacgtggtaaatcaacacgttcaaatgaccagtttagaattgttacaggtccagttaacatacctttaactggtttatctgttaagctttgtgcataaactgtttcatcaacagttaaaggcgctgtccattttacgtcaccataaatgattggtggttttacggcacgtgaaccatatgattgcacccaaccgaatttagttactaagaaaccttgtaatttttctccgaagaattcaaccatgtcattacgttcaaattcaccgtgaactaatacatctaagccgatgtcttcttgaattttaatccatcgagcaatttcattttttaagaatgtttcatatgcttcgtctgtaatgcgtttgtttttccaatctgcacggtattttcgaacttctcggctttgtgggaatgatccaatagttgttgttggtaaatccggtaagttcaaacgtttttgttgttggtcaatacgttgcgcgaatggtgattgtcttgaagtacgcacgctttcgaaatcataatctaagtttttgaatgattgattttggaaacgctcataacgtgcttttaatttatcatatttaacactatcgttttgattaaataggcgacgcaatgcatctaattcgtctaatttttcagttgcaaagcttaagccttcgccaacacttgtatctaatgtttcatcatctaaagatactggaacatgtaataatgaagatgatggttgaatgacaagctcattcgtgtgtgctaacaatttatcgattaagacttttttagattcaatgtcacttgcccatacattacgaccatcaataattccagcgtataatgtttttgatttatcaaaatctcctgcttcaatttgtttaaggttatagccattatcatggacaaagtctaaacctaaaccaccaacaggtaaagaacttaagaatttaagatgtgcacgttcgaagtatgtttgaatgactaattttttagcaacaccagctttttcgaaatagtcataagcttcacgtgtaatattttcatagctttcactgtcgtctgtaactaagattggctcatcaacttgaatgtactcagcacctgcatcaattaatgattcaaacacttctttataaagtggtaataacgttttaactttttcttcaaaagtttggtgaccgccttttgataatttaacaaaagtaatcggaccaacaatgacagggtgagcgttaacgtttaaagattgcgcgtatttaaagcgatctaataatacgttgcgactcactttaggttcaacattgtcccattcaggtacgatgtagtgatagttagtgttaaaccattttataagtgcacttgcaacatggtctttattaccgcgagcaatatcaaataataagtcatcatcgatagttctaccttggaaacgttcagggatgatattgaataataatgacgtatctaaaatatggtcatataaagagaaatcaccaactgggatgctatctaagtgatagtacttttgtaataataaattttctttatgtagatctgttaatgtttgatctaattcttctttagaaatcttctttgcccaataactttcgatggcttttttccattctctttttctacctaatcttgggaatcctaagtttgatgttttaattgttgtcataatattacctccttgtgagcagtaatagattttgagtatgctgcaagttctaatgaatcttcgacattttgaaacggtgtgataatgtataaaccattaaaatattcatgaacagtatcgattaaatcctttgaaagcttaagacttagttctcgtgttttggctttatcatctttaactgcttcaaattgttgtaaaatttcatctgacatcttgattcctggcacttcattatgcaaaaagagtgcgtttttgtaacttgcgataggcataatgcctatgaaaaatggtttgttcaagtgcttagtggcatggtaaatttcaatgattttctctttgctgtacacgggttgtgttataaaataagacattccgctttctatctttttctctagtcgttttacggcaccatctaatttacgaacattagggttaaaggcgccagcgatgttgaagtgtgtacgtttcttcagcgcatcaccgtcagtgttaataccttgattaaatcttagagcgagttcagttaatcctttagaattaacatcatagacattggttgcacctggtaagtgaccaacttttgaaggatcaccagttatggctaatatttcgttaacgccaatgagcgataatccaagtaaatgggactgcaagccgattaagtttcggtctcgacatgtaatatgtacgagtggttcaatattgtaatattgtttaattaagcttgcagcagcaatgttgctaattctgacagttgccaatgaattatctgcgagtgttaccgcatctacattagctttatcaagtttagcgatattttcaaaaaatctatccgtgtctaaatgtttcggtgtatccaattcgataataacggttggacgttcttgaaccttagatgttaatgattgtctaactttattttgagatggattgaaaagtgctttcgttggtatcggaatcacttttttgtcattaacaggtttaagtgtctgaatagattctttaataaatttgatgtgctcaggcgttgtaccacagcaaccaccaattaaacgaataccttcgcgaattagattttgagcaacttgaccgaaatattgtgcattgtcactatacttaaattcactattttcaatatctaataagctggcatttggataacaagataagtatgcgtgctctggtaattcaatatgtgtgaaagactcttgcatatggtgcgggccatgatgacaattgagtcccacgatgtttgcaccacattgaacgagttgttttaatccttcattgattgcctgaccattaactaagtaatttgtgtttgaagcggttaattgagcaatgattggaatgtcgtatttctttctcgttcgtgaaatgacatttgtgagctcttctaggtcgtaatacgtttcgaaaagtagcgcgtcaacgccttcttcaattaaggtgtctatttgaatttcagtatgataaagaatagtttgtaagctgatatcctcttgtttgatacctctaaacccaccaactgtgcctaatatatacgtatctttagttgctgctttttttgcgatgcgaacggcggcttgatgtattgctttaactttatcttcgagaccgaatcgttttaacttttcgaaatttgcaccataagtattggtttgaatgacatcagcaccagcttcgatatatgaacgatggatgcgttcaactttatctggatggctaaggttatatgcttctgggcaggtgtctaaaccttcagagtataaaatggttccaatagcgccatcagctactaaaacattatctttcaattgtgtgaggaattgactcattgaatgcctcctttaatgcgtatttgatgtctgcaatgagttcatcaggatcttcgagaccaacgcttaatcggaatagaccgaaagtgataccacgttcttgtctcactttttcaggtagtgcagcgtgagacattgttgctggatgtgaaaggatcgtttcaacaccgcccagactcactgaaacgagtggtaatgtcagtgcatcgacaaattgttgtgctttagactcatcagctaaacgaaagccaataacggcaccgccatttttagcttgttctaaatgagcagcagtgagtcccggataataaacttctgaaatttcatcttgctttattaaaaatgacacgattttttgagcgttttcgacagattgtttaaatctgattggaaatgtttttaaatgtttagcaagcgtccagctatcttgagcagataacatattgcctgtaccattttgtattaaataaagagcttcactaattgcctcattattagtaatgacagcaccagcaattaaatcgctatgtccacttaaaaattttgtagcactatgaatgacaatatcagcgccaagtaataaaggtgattgacctaacggtgtcataaatgtattgtccacagctaccagtagttcatgcttttcggctattttagaaacagctttgatatcagtaattttaaaacagggattcgatggtgtttcgatataaattaattttgtgtttgattgaatggcaccctcgatttgttcgagcttggtagtatctacggttgtaaattcaatattaaaacgattcaaaatttgctcagtgaggcgaaaagtaccgccatatacatcatcgggtaagatgacatgatcaccagatttgaaagtcaaaagtactgctgaaatagcagcaatacctgatgcaaaagcaaaagcgaattttccctgttctaatcgtgctagcttctcttctaaaagttcacggttagggttcccacttcgtgcataatcatatttaacatcgccaccaagacttgtttgatggaatgttgaagaatcatagagtggtgggttagctgaatgatattccacacctctacgccaatcgaatatcacttctgtctcttttgaaagtgtcatacaatctctccaatctgagctttatctaatgcttggatgatatcgcgttcgatgtcttcataattttcaacgcctagtgataagcggattaaatactcatcaatgccacgtttatctttttcagcatctggcatatcaacatgtgtttgtgtgtaagggaaggtcactaatgtttcagtacctcctaaactttctgcaaaaatacaaatgtctaaattttctaataatttagcgacgctataggccttgttaagtcttaaactaagcatgccagtttgcccgctatatagtacttcgtcaattgcttgaagtgactgacattttttagcaagttttcttgcgtttgattgcgcacgttcaatgcgtaaatgcaaagttttaagtccacgtaacaacaaataactatctattggtgaaagtgttgcgccagtcatgttgtgaaaatcaaacaactgttgcgcgagtgattcatctttgacggttacgacacctgctagtacatcgttatgtccaccaatatatttcgtagctgaatgtaagactatatcagcaccttctgctaatggtgttgaaagataaggtgttaaaaaagtattgtcgataattgacaataagcctttagctttacaaagttgatagtacggttttacatcaatagcaatcatttgtgggttagatattggttcaatgaataatgctactgttttatcagtgatttctttttcaacttgttcataatctgtaaaatcaacgtacttaaattttatatcgtattgttgctcgtaaaattcaaataatctaaatgtgccgccgtataaatcgaatgaaactaaaatttcatcgtgtggtttaaataaattacatattaattgaatggcggacattccacttgatgtagcgaatgaagcaacaccatgttcgagtttggcaaaacaggtttcaaatgttgaacgtgtaggatttttagtacgtgtgtaatcaaatcctgtcgattgtcctagttttggatgcttgtaggcagtagataaatggattggattcgctatagcaccggttgaatcatcagttaatgtgatttgggctaactgtgtatccttcatattaagaccctcctgtaagaaaaaataaaaagcttccgtccttcgtacccgaatgaatcggataaaaaggacgaaagcttatgtttcgcggtaccacctttatttgttattccatcgctgaaataaccttattcagtacgcattaaaagtaaatatgcttactgaacaattatcacaattaaagtcagtaagtaaggatatagtaatgtgatatcccatacttattaacaaaaatcgtgcgtaaagaatccagtacgccatttaacatcaatgttaatactgtatcgctataacgggcgaacccgtagacacctcatattggcatcaacactccaaggccattttcaaacacgctttcaaaatcttctctcagctactaaagactctctgtataagcagggtgtgttttactttcctctttattgtgtttacgtttcattaaactgttataagatattaattagcttacagagtaaaaaaagatttgtcaacaattattcagaaaatttcgatttaaaagttaatttgtttgtgaaattgtaattggtatcttgaagttgaaaaatgaattattttttaaataaagtgtggttaatggttgtctgactcatttagaatacataaaatatatttaactgttgttatcaaataaaaagtgatgtgagtgaattgtcaaaaagtgaagatcaacgtattactaaaacaaaagatgaacaaattaagcaaatagatatatcggatatcaaaccgaatccgtatcagccccgaaaaactttcgatgaaaatcatttaaatgatttggcagattcaattaagcaatatggtattttgcaaccaattgtgcttagaaaaacagtacaaggctattacattgtagttggtgaaagaaggtttagagcttcgaaaattgctggtctaaaatacgtatcagcgattatcaaagatttaacagatgaagatatgatggaactggcggtcatcgaaaatttacaaagagaagacttaaatgcgattgaagaagctgaaagttatcaacgtttgatgacagatttgaaaattacacaacaagaagtagcgaagcgattgagtaagtcgcgcccgtatatagcgaatatgttgaggttattacatttaccgaaaaagattgctgacatggtaaaagatgggcgactgacaagtgcacatggacgaacgttattggcaattaaagatgaacaacaaatgcttaggttagcgaaacgggttgttaaagaaaagtggagtgtcagatatttagaaaatcatgttaatgaattaaaaaatgtttcgtcaaagtcggaaacagacaaagtagatataactaagcctaaatttataaagcaacaagaacgacagctgcgagaacagtatggcgcaaaagtagatatatcgataaaaaaatcagtcggcaaaatctcatttgagtttgaatcacaagatgactttgtgagaatcattgaacaattaaatcgtaagtatggtaaatagttacacaattttatataatatcactttgtgaatctatagatatatcgatagttatctatattctttgaagatgatgcgacttcagtaggttggaagaatacaacaatattaataaaattatttgagactatatagaaaggagtaacgctaattatggatcaagttatgagtattatttcatcgctattcgaaccattaactaaaattgaaacatatgaaagtgtcgctactaaattagcgatgataattatatatattatcgttgcattaatcgtaattaaaatactagataaaatgattgcccaaggatttaaaatacaaaacaagagtaaaaagggtaataaaaaacgttccaaaacattaatatcattggtgcaaaatgttgttaaatatatcgtgtggtttatagttatcactaccattttaagtaaatttggcattagtgttgaaggggtaattgccagtgctggtgtcgtaggcttagcagtaggttttggtgctcaaactatagttaaagacgtaattacaggattctttattatatttgaaagccaatttgatgtaggtgattatgttaagataaataacggtggtacaactgtagcagagggaacagttaaatcaattggactccgttcaacacgcattaatacaatatctggggaacttacaatcttgccaaatagtagtatgggtgaaataacgaattactcaattacgaatggaacagcaattgttaaaattccagtatctgtagatgaaaatattgataatgttgagaagaaattaaacaaattatttacatctctgcgtagtaaatattatttatttgtaagtgatcctgttgtgattggtattgatgcctttgaagatactagagtaatattaagggtttcagcagaaactataccaggtgaaggtttctctggtgcgcgtattattcgtaaagaagtacaaaaaatgtttttacaagaaggtattaagacaccacaaccaataatgacaccttttaatcatagtgaaaacggtgtttagtagtttataatacatggaggtcatatttaatggcgtcaaaatatggaataaatgatatagtagaaatgaaaaaacaacatgcgtgtggaaccaatcgttttaaaattattagaatgggtgctgacattagaattaagtgtgaaaattgtcaacgaagcattatgattccacgtcaaacgtttgataaaaaactaaaaaaaatcatcgtatctcaggatgatacacaaagataggagaatgattcatggctttaacagcaggtatcgttggcttaccaaacgttggtaaatcaacattatttaatgcaattacaaaggcgggtgccttggcagcaaactatccgtttgcaactatagacccaaacgtgggtattgtagaagtgccagatgcaagactacttaaattagaagaaatggttcaacctaaaaaaacattacctactacatttgaatttacagatattgccggaattgttaaaggtgcttctaaaggtgaaggtttaggtaataaattcttatcacatattagagaagtagatgcaatttgtcaggttgttcgtgcttttgacgatgataatgtaacacatgtagctggtcgagttgatccaattgatgacatcgaagttatcaatatggaattagtacttgcagacttagaatcagttgaaaaacgcttacctagaattgaaaaattggcacgtcaaaaagataagactgctgaaatggaagtgcgtattttaacaactattaaagaagctttagaaaatggtaaacccgctcgtagtattgactttaatgaagaagatcaaaaatgggtgaatcaagcgcaattactgacgtctaaaaaaatgctttatatcgctaatgttggtgaagatgaaattggtgatgatgataatgataaagtaaaagcgattcgtgaatatgcagcgcaagaagactctgaagtgattgttattagtgcaaaaattgaagaagaaattgctacattagatgatgaagataaagaaatgttcttagaagatttaggtatcgaagaaccaggattagatcgattaattagaacaacttatgaattattaggattatcaacatattttactgctggtgtgcaagaagtacgtgcttggacatttaaacaaggtatgactgcacctcaatgtgctggtatcattcatactgattttgaacgtggatttatccgtgccgaagtaacaagttatgacgactatgtacaatatggtggcgaaagtggcgctaaagaagcgggcagacaacgattagaaggtaaagaatatattatgcaagatggcgacatcgttcatttcagatttaatgtataaacgatagagtgaagttaattaaatagaatatatgtagaagaggcggaatcaattgttcgcctcttttaattatgcttataatttattaaaagaatggaataattttactcgcgttaataatatcttgagtgctgaaaaattgtttgccttcgccagtataagcaggctctaaaacaagattagcctttgcacaataaagccattcaggatgaatgccactattaagtatctcttggaattcttgaaaatctttagaccaatcaatatttaaattcattccttatcacctcacagctattatagaacacgtgttcgcttttgtgaagtgtatttttaaaaatatcatagaaaatttcaaatgaattaatgtcaaaaatgatatgaagagtagtttgaattattattgtaaaaagtaatggcgcatgatataattctttattgtgagtaatgaaaattattccttgcttatctgttttaagattgataagccgtatagaccacaaggaggtgcaaatataaaatgagaacatatgaagttatgtacatcgtacgcccaaacattgaggaagatgctaaaaaagcgttagttgaacgtttcaacggtatcttagctactgaaggtgcagaagttttagaagcaaaagactggggtaaacgtcgcctagcttatgaaatcaatgatttcaaagatggcttctacaacatcgtacgtgttaaatctgataacaacaaagctactgacgaattccaacgtctagctaaaatcagtgacgatatcattcgttacatggttattcgtgaagacgaagacaagtaataattagagggggcgtttaaatgctaaatagagttgtattagtaggtcgtttaacgaaagatccggaatacagaaccactccctcaggtgtgagtgtagcgacattcactcttgcagtaaatcgtacgttcacgaatgctcaaggggagcgcgaagcagattttattaactgtgttgtttttagaagacaagcagataatgtaaataactatttatctaaaggtagtttagctggtgtagatggtcgcttacaatcccgtaattatgaaaatcaagaaggtcgtcgtgtgtttgttactgaagttgtgtgtgatagtgttcaattccttgaacctaaaaatgcgcaacaaaatggtggccaacgtcaacaaaatgaattccaagattacggtcaaggattcggtggtcaacaatcaggacaaaacaattcgtacaataattcatcaaacacgaaacaatctgataatccatttgcaaatgcaaacggaccgattgatataagtgatgatgacttaccattctaataaaaattaacgaaattaaagcgaaaaaattatcaaaggaggcacacaatcatggcaggtggaccaagaagaggcggacgtcgtcgtaaaaaagtatgctatttcacagcaaatggtattacacatatcgactacaaagacactgaattattaaaacgttttatctcagaacgcggtaaaattttaccacgtcgtgtaactggtacttcagctaaatatcaacgtatgttgactacagctatcaaacgttctcgtcatatggcattattaccatatgttaaagaagaacaataatatttaatatattataaccctcgtaggcataggcttatgggggatttttttatgctttgggatatagaaaagggacagaaaagggtaaaaaagaggaggtgaagttttgtgtttggggtttgcacaaagatatgtttatattacaaaaataatatgaatttagatgaataaaaaaagaggcaaccgtcagtaacagttaacctcaagtgcattccgcagatatgcaccgctatttatgtataatattaatctgtttttagataaaaatcaaggttattgataaagttctttaaacttcttaatttaggtcttgctcgaacgcctataattttatcataagtcgactcgcttatctttgatcgtaaaaaatcaaggttttgttcgaattgctttataattctttggagttctgttttagaataagagagaccagaacaaattagaattaataaaatgagataatcaattattctgtcgaaatctaaattgtgtatatccatttttactgctaaatattcttttaatctattacttgtctctccagttttaaatctacagtcataaagtacaccattgtgagctatagcatttcttaagcctttcatacaatcaatgatgtcacctagtatatctttactttgatcaaatgctggggagtataattttagttgcttttgagcttctatattcaaattttgggacatgcaacgagtgaaaaataccagatttcctaaagtgaacaattcaaatacggcatatagtggcacggttctatcttgatgtatgtaatgataaatgtaaggttttgaattacaatgttcatggatcatgtcgtaaatatctcttcttagtctagtagtattttttaaatgctttttatattttgagctaccgggactataacttttataatatgttaatgatttttgaaataaactatctaaatcaaagccagagtttacacaaactatttctagcaatctatttttaatagccgtttcacagaacataacgtgtttatagaaaaggcttttaatttctgtatcaaaactgtataaagcgtgtaattcgctgaatttttcaaaattaagttcttcctctttgtttaaaaagaaattataccctttgaatccatgaaaatagccgatgtttcgtaactggattttttccgtgctaccatttatttggatacctttattgtctcttatatgtctcattaaaccatcagtagttttaggtgtttttctgttcatagtttttaactccccagtcgttcaaatttattcatcatatctttcgccatctgattagtaacatgtgtgtatatctctagatttttttataatctgaatgacctacatgctcttgcattgcttttaagttaattcctaattgagcaagtgcagatatatgcgaatgatgtataatgtatgcgtcgttacaggtttcttaatagaactaatctcagttgtctctttgatagtgccccctttaataatgttgctaattttgttcgagtcgatagggccaccagctgcatttgtgaatatgtaacctatattaataaacttatcactatggatagtgaggcctatagccctatagctgttacttgttctagttgtctcttttactccggatactcccgtcatttttcagttatccaattaattgtaccatcgatatctagcgttttatcttcatggtttatattttctctctttattgcaagtagctcaccgatacgcatgccattagcaatttgaaactgtaccatagcttttaccattttataattacgctttctcgttggatatttttatacttaattacatagtcgaaacaatccggtatttctttcactacattatcttctaaagtgttattacgtttagctagtaacgcatcactatagggatatctattttatctattacacatataactttgaattgcttactattttaaattaacaaattctattctcttagatttactccaattgtgtgtagacgatttatagttattaaattcagagtggtagcaaattaaagttaatcaagagttaagatgaatttaattcatgaacacgtctattatttttataattgtagcaaataaagctttacatcaaggaggtaattaaatatgttcaaaaaatatgactcaaaaaattcaatcgtattaaaatctattctatcgctaggtatcatctatgggggaacatttggaatatatccaaaagcagacgcgtcaacacaaaattcctcaagtgtacaagataaacaattccaaaaagttgaagaagtaccaaataattcagaaaaagctttggttaaaaaactgtacgatagatacagccaaaatacaataaacggaaaatctaataaatctaggaattgggtttattcagagagacctttaaatgaaaatcaagttcgcatacatttagaaggtacatacacagttgctgatagattgtatacacctaagagaaatattactcttaataaagaagttgtcactttaaaagaattggatcatattataagatttgctcatatttcttatggcttatatatgggagaacatttgcctaaaggtaacatcgtcataaatacaaagaatggtggtaaatatacattagagtcgcataaagagctacaaaaagatagggaaaatgtaaaaaataatactgatgatataaaaaatgtaactttcgaacttgtgaaaagtgttaatgacattgaacaagtttgaaattaagttaaattagtatatacagtgttttatcgctaatactttgaaagttaggtatctaaaggtgcctagctttctttgttatgattagcaccatcatatagaaaattctttaatgacgtttatgccgaaatctacaaaaataatttctcttttatggttaatcaatatgtttttacattcgacaaccttaaaattaacttctttcaattcaataataaagtctctataaaataacttagtttaaaaacgattcgtatctttcagattcaaataccattattttctcctaagacttacattttaattacaattatgtaagttgttttcagagacatcctattttatattttgtcagaggtgatcttttgaaaacgattttaaaaacaataacatatctcgcacttactatcattggcgcttatgctgctttattcattttaaaaacaatagactctcatggtataacagatcaatttaacccattagtaaaggaagatgattcttatgttaaaacgacagaggtgtctactagaatggatgatcaactccgaagttatagtcaaagtgcttttaataaagaagggaaagagacgcaattaatgtatactgctacatttgatgttaaaccgcatagatacttgaaaattacacataaaggtcatcatgtagaaacttttgaagaagttgaaaaggaagaagtaccaaagaaagcattagccaaattgaggcgataataacgggtttatattacatggttcattttaaagatgagtacgaaatgaagtgacacatgaagagtaatttaaaaaaatttgtaataattatgaatagaattaaaaacaaggggtaatacaatctatatagcatataagcttttgttatgagtttcaaaaaaaggaagagagagtgatattatgaaattaaaatcattagcagtgttatcaatgtcagcggtggtgcttactgcatgtggcaatgatactccaaaagatgaaacaaaatcaacagagtcaaatactaatcaagacactaatacaacaaaagatgttattgcattaaaagatgttaaaacaagcccagaagatgctgtgaaaaaagctgaagaaacttacaaaggccaaaagttgaaaggaatttcatttgaaaattctaatggtgaatgggcttataaagtgacgcaacaaaaatctggtgaagagtcagaagtacttgttgctgataaaaataaaaaagtgattaacaaaaagactgaaaaagaagatacagtgaatgaaaatgataactttaaatatagcgatgctatagattacaaaaaagccattaaagaaggacaaaaagaatttgatggtgatattaaagaatggtcacttgaaaaagatgatggcaaacttgtttacaatatcgatttgaaaaaaggtaataaaaaacaagaagttactgttgatgctaaaaacggtaaagtattaaagagtgagcaagatcactaaaatatgtcgtaatactaatgataataacatgtcttaattcatattaattattaaaataccctcacaacgcaatgtaatatatccagtatagatttgaaaggatatatgcctaacgtgttgtgagggtttaattgcatctatttatccatgcgaatatcgacttcttctaaatgtttctgatattctttaaccttactttctaaaaacatttcatatggtgcatcaaagaagtcagctaaatgcatggcatctttaaatttaggttcatggtgatgattctcccattcccaaatttgatgtgcttcatatttagtaccatatttctcatttaattgttgtgctaattcgtcaatttctaaattatgtttagttcgtaagttatataaaatatgcatattcattgttcattaacctcgcttcttgatttaaaattcaaagatgctctaataatatgtgtatattctagtcctataacataaaataatcaagctatgaattcgccagaaaaaataatgtatttgatattgccggtacagagactttaaataacgatagctacattgaataaaattgatattcaattactactttgaaaaatatttagataaaaataatttgaatttgttttagaaagtctaataacgggtactacttagaataacgcaaaataaatagaaaaaggagactgaaaattatgtttggatttattggaatgttaattgtcggtggcttaattggatgggctgctggtgctattatgggtaaagatatcccaggtggtattttaggtaatattatcgcaggtattattggatcatggttaggtggaacattattaggacattggggtcctgaactaggaagtatttacatcttaccagctttaattggttcaattatcttaattgcactggtaactttaattttaagagctgttcgtaaaaaataaaatattcaacttaggttgaattgaaataaagatggcattcagttgtcatcttttttatttgcgtgaaaatggtcaatatgtattataatatttgaaaatgtaggtaagataggattgaaaagtaataaattaacatgaggagaggttggaaataaaaaagcgagtatttgacaaataaaaaaaaggatgacgttgggttgcgccatccaggagtattatgttcatgaatataaaagactgtgtagtcatttaagaactacacccatatagtaacacatcacttgattaaagacaatactatttttagagtcattaatttaaaatatgaattaattatttttttagaatagaatattgagattgatatcgaattagtagtcaaagtgttatggtagatatgaaatacataaggtaaggagtaatattatgacgatttatttagttagacatggcgaatcaaaatcgaattatgataataaacattttagatcttatttttgtggacaattagatgtgccgttaacggaaactggcacaaaaagtgcagacgatttatgtgattattttaaagagaaacagattaaacatgtatatgtttcagacttattaagaacacagcaaacgtttgaacatatttttccatatgacattgcatcaacgactacgcctttattaagagaacgttcacttggcgtatttgagggtgaatataaagatgaaatcagtgcgaatccgaaatatgaaaagtatttcaatgatccaaagtttaaagactttcggcatagtttttcacaaaaagcgcctaaaggagaaagttatgaagatgtatatcaacgcgtagaacattttatgaatcatgttgtcaatgaagatacacaaaaagatgatatcgtcattgttgcacatcaagttgtcattcgttgtttaatggtttattttaataacgtttcacgggaagaagctgtggatttaaaagttgaaaattgcaaaccatatatcattgaatagaagtatagaggttctgaaaaactgtgttttatagcggccttcagaaccttttttgcatttggaatttaatgggaatcattcttatcaacagacttatcaccaatagctaatgtgataattgcgcttacgaacaaaataattgaagttataaatgacgctaatgtaaaaggtgtaaattgtgtgagcgataatatcaatgataaaaagaaccaagagatagcccctagaaattgtaaaatagcagaagaaattctaaaactcatataatcatatatatctaaaacaagtgaaggtaatgcgactaataccattataatgatgttgagggtgaataaatatggctgttcaaaagttactgtgtttggtcctgttggatgcattgctgctaagaacaagcaaacaatcgtcgataaaattgctaaaataataaaagtaattcgaactttcatcatgaccatcctttgtttatagagtcaatataagtatggaatatgttagggatatagtcaaatgcgtcaactaatggggattttaggatggatagagaatttaaaaccaataaaaaacaggctgggacataaatcaatgttctatgctctacgaagttatattggcagtagttgactgaacgaaaatgcgcttgtaacaagcttttttcaattctagtcaaccttgccggggtgggacgacgaaataaattttgcgaaaatatcatttctgtcccactcccaaaatggtatggtattggttaaaatgtattgtctcaaagattagtcacttttaaagataaagaattgtcatgaattaaagctcatgtaatgatgtgttacatgtcgcaataatggcattcagttatttatcgataacatcactcttgatacctttagattttaagaaatctttaattttatcttgttgctttttattaacatcaccggcatattttgttggcacatcgacaacattgattttattttgcggttgatagctaagcttttcaatatcttcatcaacattggcgattgtactatttaaagctttgaagtaattcatcattaattcaacgggtttcttatattctttaggaatattgttttcagtgacaaatttcttgaaatgcaaatcatttttaacagctaagttagataagtgactaagtgtttctgcttgtttttcagtcacttttgtttgactgtcaatttgtttatctagtttatgttgcattatatatttgttatcaagtatatcgctatttacagacaaatacttttctatagcttgcttcatctctgcatcactaatatcactatttttcttatctgagttaaagatatcttttgtttctaattttttagcgcttttaggtgcatggatgccagtacttgtgtgatgatcttcgttatcagattgatcggacgcgcaacctgtaagaattaatgtcgatgctaaaaatgtacttagtagtaatctctttttcataatgtaatataactccttagtttatctttaattgaaaaaatatgtattcatgctaatagagtaacgttgaattagtgtggaatgtcacgatgaccttgcaatgaccatagacgtaaatgattacgtgcatgagttgctttttctatcaataatgcgtcgcttgaaacgttgttaaggatagcattatctataaataactgcataattggttgtactaatttagacgtaggtatcgtacgtaaaagcataatgatttcattcacatacttttccttctcaatatcatttttcatattgatttgtttgcaagaggtacatactttaagcattatcgcacatctcgctgtatatattaagtttatcataacatgattttatgtcaggataaaaaaataacagcatcttaacaaatgtaagatactgtcaatgaaactgtgaaaactttagtttctgataatatagtcaaaggcatttaatgctgcatttgcacctgcgcccattgaaataataatttgtttgttcttctgatctgtgacatcaccagctgcgaatataccaggaacattcgtattattgttacgatcaataacaatttcaccacgttcgtttaattcaacagcatcttttaaccatgatgtgtttggaagtaaaccaatttgaacaaagataccatctaagttaagtagatgttcttcgccggtgctcatgtcttcgtaacgtatacctgtaacatggtcttctccgacaacttcagtagttttggcatttgttttgatatcaacatttgataaagaacgtaaacgatcttgtaacacgttgtctgcttttaattcgctagcgaattcgaataatgtaacatgattaacgataccagcaaggtcaattgctgcttcaaccccagagttaccgccaccgataactgctacgtctttattttcaaatagaggtccgtcacagtgagggcagaatgcaacacctttattaatcaattgctcttcacctggaatgtttagcttacgccaacctgcaccagtagcgataatgactgttttactttctaagatagcaccgttttctaatgtaactttaattgcttcgtcagtcttttcgatatctgtagcacgtatacctgtcattgcatcaatgtcatattgatcaatgtgcgctgctaagttagaagaaaattcagaaccagttgtttctttaacagtaatgaagttctcaataccagcagtatcattaacttggccaccgatacgatcagcaactataccagtacgtaaacctttacgtgctgtgtaaatcgctgcactaccactagcaggaccaccaccaacgattaagacatcataaggttctttattttcaaactcagatgcatctgccgtactgcctagtttcgaaagaatatcttggattgtcatacgaccattgccaaattcttcgccatttaaaaagacagcagggactgccatgatgttttcagattcttcacggaacactgcaccatcaatcatagaatgcgtgatgttagggttgatcacactcattaagttaagtgcttgaacgacatcaggacatttttgacacgttaaactaatgaatgtttcaaaatggaatgaaccttctaagtttttaatttggtcaatgattgactgtttttctttaggtgcacgaccactaacctgtaaaattgctaaaacaagtgagttaaactcgtgacctaatggaatacctgcaaatgttacacctgtttcttcgccaggacgattgactgagaaacttggtgtacgttttaaagacttttcagaaagtgaaagtctaggtgacatatcagaaatttctgttaataattctttgagttccttagatttatcatctgaaccaaggctggcaacgaattcaacgttgccctccattagttctaatagttgtttaagttgttgttttaaatcagcattaagcatggttgtaatgcctccttagattttacctactaaatctaaaccaggttgcaatgttttagcgccttcttcccatttagctgggcatacttcgccagggtttttacgaacatattgagctgctttgattttgtgagctaatgtactagcgtcacggccaattccgtcagcgttaatttcagatgcttgtacaacaccgtctgggtcgataatgaatgtaccacgttgagctaaaccagtagcttcatctaatacatcaaaattacgagtgattgtttgtgatgggtcaccaatcatagtgtaagtgattttactaattgcatctgaatggtcatgccatgctttgtgtacgaagtgagtatcagttgatactgagaatacatttacgcctaatttttgtaattcttcatattggttttgtaagtcttctaattcagttggacaaacgaatgagaagtcagcaggatagaagcatactacgctccaagaaccttttaaatcttcttgtgtaacttctttaaattgatctttttttggatcgaaagcttgcgctgtaaatggtaagatttctttgttaattaatgacataaatatcttcctcctaagaatttaagtatgaattagaactatcaattgattgtgcttaattataataattctaatctcttagttagcattattacattttgatccagaatagtcaactggataactttgtaaagtgaatgattacttttaaaataaagaaagataatataaagtgctttgataatggattttgtagtcgatgatttaaaaggttgtgtctatatttaatatcttgattttaatgtaaaaaatgtaaaaaaagaagatttgtattctcaactaagtcaaccttattgataatggtgtgagaatatttgttcgagatggatgaaggtaatgcgtgagaaactggattttttaagtacgagacaatattttcgaaagttcgattattaacttataagcaaataattgctataaaaaagtttggacgtgtacaattgcaatatgaagatttttaattaactgtaaagtatcgaggagtggataacgtgtcagatcatgtatataatcttgtgaaaaagcatcattctgttagaaaatttaagaataaacctttaagtgaagacgttgttaagaaattggtagaagctggacaaagcgcttcgacgtcaagtttcctacaagcatactcaattattggtatcgacgatgagaagattaaagaaaatttacgagaagtttctggtcaaccttatgttgtagaaaatggctatttattcgtctttgttattgattattatcgtcatcatttagttgatcaacatgctgaaactgatatggaaaatgcatatggttcaacggaaggtttgctagtaggtgcaatcgatgcagcattagttgccgaaaatattgcggtaactgctgaagatatggggtatggcattgtctttttaggatcattaagaaatgatgttgaacgagttcgagaaattttagacttacctgactatgtcttcccggtatttggtatggcagtaggggaacccgcagatgacgaaaatggtgcagccaagccacgattaccatttgaccatgtcttccatcataataagtatcatgctgataaggaaacacagtatgcacaaatggcagattacgatcagacaatcagtgagtactatgatcaacgtacaaacgggaatcgcaaagaaacatggtcgcagcaaattgagatgttcctaggaaacaaagcaagattagatatgttagaacaattgcaaaaatcaggcttaatacagcgatagcaagacaccaaaataacccgccccctctagcttaaaatgataagtatagctagagggggcgggtatttcttgcaatgaattagtgtgaagttaatgcagcattatcatttgattcgaaagtatctttgtcccaatgtttagttaacttggcggtacctgtaccagctagcattgaatcgttcacgtttaatgctgttctacccatgtcaatcaagggttcaacggagatgagcacgccggctaaagcgactggcaagtttaacgttgacaacaccaatatggatgcaaatgtagccccgccaccgacgccagcaacgccgaatgaactaataatcacgacagcgattaacgttacaataaattgtaaatcaatttctacattagcgacgggtgcgaccataattgcaagcatggcaggataaatgcctgcacaaccattttgtccaatcgacaatccaaatgtcgcagcgaaattggcaataccctctggcacgcctagacgtcttgtttgtgtttgtacattcagtggtaaagcacctgcgcttgagcgtgatgtgaatgcaaagattaatacttccaaagtctttttaatatagcgaatagggctaatgcctaacaggcttaaaataattaagtgaatgatatacatcgtaattaatgcagcgtacgatgcgattaagaattttcctaaagtccaaatggcgccaaagtcacttgtcgataacgtgttggccataattgctaatacaccgtatggcgttaaacgtaagacgaacgtcacaatcgccattactagtgaatagatagcgtcaatcgcacgcttaagcaattcaccatgatcaggttgtttgcgtgctacgcgtaaataagcaaatcctataaacgaagcaaatatcacgacagcaatagtggaagttgcacgttgtccagtgaaatctaagaatggatttttaggcaataattccaaaatttgttgtggtaacgtatgtgctgttaaatcctttgcttgtttagcaatttcgcttccacgtgcttgttcagcgttgccaagattaattgttgatgcgtctaaaccaaacaccaaggcatacacaactcctacaatcgcagcaatcgtgacagtgccgattaaaaagataaaaatgagactaccaattttagcaaacttttctccgatttgaattttagtgaatgcagcgacaatagaaatgaaaattaaaggcatcacaatcatttgcaacagagcaacgtaaccttgtccgacaatgttgaaccagtcacttgttgatgtaataacattagaatgtgtgccataggcaagatgtagtaacacgccaaatacaatgccgatacctaaagctgtaaacacacgtttcgcaaaagatatatgtttacgagccgtcatgtgcaatattacgatgaaaatcaccaatacaataatattaatcagtgtaagaaaagcattcatgaacgtcactcctcaaatttttgaatataattccgactagtatgctaagaataatattaattttaaaatatttcaagagggcatttgcaattaaatgtaaacatgatgaaattcgaccgttggcataagggaatttgtaaacaaatcgttttgaattcagtagagaaaggtgaaaagggttaatagcgttgtgagctagtcgattaaagttaatatttgaaaatgaagcaaggtattaaatgcaataaattaaataagttgtcattacagtgttaatactagaaatgattttaacgggaaaaaagtgatgaatatttggaaaagatatatatcgtgcactgtcatgagagataagatttgagaaaacaaatgtatccttgaatcgagatgtggctatggcggtttgataaaaattgctaacctcatatttattgaatgaaaaggtaataaatgatcaacctggaaaagacgcttcgaacaaacacgttgtaaaaaattctgtcgaatcaaaattagcatcttttgagggttcgtgtgtgcaggtggtagttcaaaagctaccgtaaacaaatatttttgtttgagcaaaaaggcgtttgtagtaaatgtgaatatgagtgtgcacttgtgcgattcttcagttactaacaaagccaaacatttaaattgaatgggcttattaagatgaatctatttaggagtacacagaagccatcccttttaaaagtaacatactacaaaaatttattcaaaattcaatattaatcataatgaataattaaaaaacctgaaacaaattagtttgatatgctctcttcaaagtagatattgaaaggagtatatcagcttgtttcaggttttatgaattgagtattaaatttgaaaataaattacagttctataggtttataaaagatcagatttaaatcatagctatatattactgagtcttaaacttgtgttcaaatcacaagtttacaggttgaataaacgtgcgaagaaaccttttttctcttcttgaggtttaggttctgccatttcagcctgtgaagctttgctgtcattttctgctttcgcttccaatgaatcgttcgaagtagcttgtttagaagcttctgcatgggcttctgctacttgttgttcagcatcatgttgcgcttctgcatctactgtagcttctttatttgaagtctcagctgctttgtcatttttagactgctcaacgctggctttttctattgcttcagttgcagaaatttgatcctctttatctactttagtagcggtgccatcgcctgcattttctgctttagtatccgtcttggcgtctattgatgtattcactccagcaacttttgaatctttgctgtcagctttatcttcagtaacagcataactttcaactttatttgttgattcagctaatacttttgcttgagatgcttgtgcttcttggatagcctcttgtgatgtttggatggcttttaaggattcgctatttgaatcgattttagttgtaagttgattttgaagttcttttaattcttgttgttgctgatgtacttgattcatcatttgaccaagtaggtgacgttcttcgcgcattttctggatttctagacgtaaatcttctactagttgagcgacattttgattagtaggtaagtttttgtcatcgtttttgacaatgacttgcaggaagtctttttctttttctaattcatcaaacgctagatcataactatttgtttgttttactttgtcggcaatgtctttgaaaagctcgatatcttcttctttgaaatcagttgcttcacgaccacgatattcagtcttgcttagttggtaaccacgttcttctaaatgttgaacaattttacggacttgcttctcacttagttctacgcgttgtgcaaattctttagttaacatactttaaagtcctttctgcatatactttatgtatactgacgtttgtctacgggcagtgaaacgtcagtcttgcttcatacatagtttaaacgttattgttagtgatttcaagtttgtttaaaatggtttacgtaaatccatttcttctaataaagcataaataatttcacgtgcgataccattggcaaatacatacttcaaaatataattagatttaacacttgtaccgtagatatcctttgtcagtttaatattcttctttaaaaataggtcgacttttttagtgtgaccatcattagttggatgaatgtaatcaatttcagtttgtctttcaaattgatgttcgtataaaaactgtctacggtgttcaataatgagcccattattttgtgttaaatctgcaggttctttagggacttccatcattaaaaagttaatacttctagaatgaacaaggtttgataataagtttagttcatgttcaatttgatgtaatgtttgtgtcattaactcatcatggttgggtaggtcttttgcgaataaataaattaaaaatgctgaattggttgtggcttcataatgtgcagttgctagactgacaacaacatcgttttctaagcctactataaagacataatcgttttcagttttgttgttttctaatgagcgtttgatgatacgtttatcttcagttaaagataaatttaacttagtatcgtaaagtttaagtgcttcgttgtaatgtggatctttgacagattgaatggttttaaattccataagaacacctccccaatttaaataatattatagcataatcgcctgctgtaaaagactgttcataaacttttaaatggtataaaaaactgtactatcttaaattagacagtacagtaatctcattttgaattcagtgtgataactaagctttgggacctttagatgcttcggcaaaatgtgtaatatcaacttcttcataagctgaattattttccagtacttcttggtgagatgaacgatcgcgaacgccaacaactaacatgttatcgtctaaaataagttgtttatatttttctaattcatcaggcgttaaattgtatcgtgataaaacggcgtgctcaccgtcttccccagttaacagtttagtcattctatcactaaatgttccacttgttgagataagtgagatttcagagtcgtgtaagtcatttaggtgtaatttacttttactaataattgttagctctgattctaaataaccttcagatttcttttgattgattacgttgtataattcgccagtgtcatttactacagtaatatctgccatagttgtcgcccctttaaaaatttgtttatttaatcttttacccttcttattataaagtaaaacccttacattattaagttataagtcttcattcgcattaaacgtctctgtacatttataaaactattaaaagattacctaagcagttattgaaaaaatgccgaaaatttgctattatcgttaaataatttacataaactcatataatctaaagaatatggctttagaagtttctaccatgttgccttgaacgacatgactatgagtaacaacacaatactaggagtagcttcagccattaaattgtaaccatgatgggtgatttatatcattttatatgatggtcacagtttatttgatgaaacttcttttacattgattgcatgaccaatacgtgatgcatgttcgttcactcataaaccctgaaactattatttagtttggggatttttttgtatctagcaccaatttaagagcaaaatgtttcacacaaatctgaggaggttttaagagtggagttactaggacaaaaagtaaaggaagacggcgttgtcattgatgagaagattttaaaagtcgatggatttttaaatcatccaattgatgcaaagttaatgaatgaagttggtcgcactttttacgagcaatttaaagataaagggattactaaaatcttaaccattgaagcttccggtatcgcaccagcaatcatggctgcactgcattttgatgtgccatgtttatttgcgaaaaaagcaaaacctagcactttgacggatggttattatgaaacatctattcattcatttactaaaaataaaacaagtacggtcattgtttcaaaagaatttttatcagaagaagatactgtacttatcatcgatgactttttagcaaatggtgatgcttcattagggttatacgatatcgcacagcaagcgaatgctaagacagctggtattggtattgttgttgaaaagagttttcaaaatggacatcaacgtttagaagaagcaggtttaacagtttcttctctctgcaaggttgcttcactagaaggaaataaagtgacattggtgggagaagaataatgaaaaatttaatcctaagtgttcaacatcttttagctatgtacgcaggtgccatcttagttccaatcattgttggtacaagtttgaagtttacacctgaacaaatcgcttacttagttacagtagatatatttatgtgtggggttgccacatttttacaagccaataaagtaacgggaacaggattaccgatcgttcttggatgtacattcacggctgttgcgcccatgattttaattggtcaaacgaaaggaatagatgtactttacggttcgctatttttatcagggatattagttattatcatcgcgccattcttttcccatcttgtaaaattcttcccaccagtagtaacgggtagtgttgttactatcattggtatcaatttaatgccagtagcaatgaattacttagctggaggtcaaggtgcaaaggactatggagatgttaagaacattttgttaggtttaatgacattaatcattattcttgttttacaaagattcacaactggatttattaagagtattgccatattaattggactcgttttaggaacgataggtgctggcttacttgggatggtcgatattaatcaagtcaatcatgccggttggttaggcatcccagtgccgtttagattctcaggatttagctttgatgtgacatcgacgttagtgttctttattgtagctatcgttagtttaattgagtcgacaggtgtctatcatgcgttaagtgaaattaccggtaagaagttagaaagaaaagattttcgtaaaggttatactgcggaaggtctagcgatagtgttaggttctatattcaattcatttccgtatacagcctattcgcaaaatgtaggacttgtttctttatccggcgctaagaaaaacaatgttatatacggcatggtcgtgttattacttatatgtggttgtatacctaagcttggcgcattagcaaatatcataccgctacctgtgttaggcggtgcgatgatagctatgtttggcatggtaatggcatatggtgttagtatattaggacatatcgattttaaaaatcaaaataatttattaattatcgctgtatcagtaggattaggtactggtataagcgctgtaccacaagcatttaaaggtttaggtgaacaatttgcatggttgactcaaaacggaattgttttaggcgcaatctctgcaattattcttaatttcttttttaatggaataaagtataaacaaacggaagaaaatgtgaaataatataactaattaatttgaaaaatggaggctgtttttaatgtgggaaagtaaatttgcaaaagaatcattaacgtttgatgatgtgttattaattccagcacaatctgatattttaccgaaagacgttgatttaagcgtacaattatcagacaaagttaaattaaatattccagttatttctgctggtatggatactgtaactgaatctaaaatggcgattgctatggctcgtcaaggtggtttaggtgttattcataaaaatatgggcgttgaagaacaagcggacgaagttcaaaaagtaaaacgctcagaaaatggtgtcatttcaaacccatttttcttaacaccagaagaaagtgtttatgaagcggaagcattaatgggtaaataccgtatttcaggtgtaccaattgttgataataaagaagatcgcaacttagtaggtattttaacaaaccgcgacttacgttttattgaagacttctcaattaaaattgtagatgtaatgacgcaagaaaatttaattacagctccagtgaatacaacacttgaagaagcagaaaaaattctccaaaaacataagattgaaaagttaccattagttaaagacggacgtctagaaggtcttattactattaaagatattgaaaaagttatcgaattccctaatgcagcaaaagatgaacatggtcgtctacttgtagccgcagcaatcggtatttcaaaagacactgatattcgtgctcaaaaattagtcgaagcaggtgtggatgtcttagttatcgatacagcacatggtcactctaaaggcgttatcgatcaagtgaaacatattaagaagacttacccagaaatcacattagtagcaggtaacgtagcaactgcagaagcaacaaaggatttatttgaagcgggtgcagatattgttaaagttggtattggcccaggttcaatttgtacgacacgtgttgtagcaggtgttggtgtaccacaaattacagcaatttatgattgtgcaactgaagcacgcaaacatggtaaagctatcattgctgatggcggtattaaattctcaggagatatcattaaagcattagctgctggtggacatgcggttatgttaggcagcttattagcaggtactgaagaaagtccaggcgcaacagaaattttccaaggtagacaatataaagtataccgcggtatgggttctttaggtgcgatggaaaaaggttcaaatgaccgttacttccaagaggacaaagcgcctaagaaatttgttcctgaaggtatcgaaggacgtacggcatataaaggtgcgttacaagatacaatttaccaattaatgggcggtgtgcgtgctggtatgggttatactggttcacacgatttaagagaattacgcgaagaagcacaatttacacgtatgggccctgctggtttagcagaaagccatccacataatattcaaattacgaaagaatcaccgaactactcattctaattaagataaaggagaacgacaaatatggaaatggcaaaagaacaagagttaatccttgtcttagactttggtagccaatacaaccaattaattacacgccgaattcgtgaaatgggcgtttatagtgaattacacgatcatgaaatttcaattgaagaaattaagaaaatgaatccaaaaggtatcatcttatcaggtggtccaaattcagtttatgaagaaggttcatttacaattgatccggaaatatataatttaggaattccagtacttggtatttgttacggcatgcaattaactactaaattattaggtggtaaagttgaacgtgccaatgaacgtgaatacggtaaagcaatcattaatgcgaagtcagatgagttattcgctggcttaccagcagaacaaacagtttggatgagtcattctgataaagttattgaaattccagaaggctttgaagttatcgctgatagcccaagcacagactatgcagcaatcgaagataagaaacgtcgcatttatggtgttcaattccatccagaagtacgtcatacagaatatggtaatgatttattaaataattttgtccgtcgtgtttgtgattgtaaaggtcaatggacaatggaaaactttatcgaaatcgaaattgaaaagattcgtcaacgcgtaggagaccgtcgtgtattatgtgcaatgagtggcggcgtagattcatctgttgtagctgtactattgcataaagcaattggtgatcaactaacatgtatctttgtagaccatggcttacttcgtaaaggtgaaggcgacatggttatggagcaattcggtgaaggtttcaacatgaatattattcgtgttaatgcgaaagatcgctttatgaataaattaaaaggtgtttcagatcctgaacaaaaacgtaaaatcattggtaatgaatttgtatatgtgtttgatgatgaagcatcaaaactcaaaggtgtagacttccttgcgcaaggaacactatatacagacgtcatcgaatcaggtactaagacagcacaaacaatcaaatcacaccacaatgttggtggattaccagaagacatggaattcgaattaatcgaaccaatcaatacattgtttaaagatgaagtacgtaaattaggtattgaactaggtattccagaacatttagtgtggagacaaccattcccaggacctggtcttggtattcgtgtacttggagaaattactgaagataaactagaaatcgttagagaatcagacgcgattttacgccaagtgattagagaagaaggtcttgaaagagaaatttggcaatacttcacagtgttaccaaacattcaatcagtaggtgttatgggagactaccgtacgtatgatcacacagtaggtattcgtgcagtaacatctatcgacggcatgacaagtgactttgcacgcatcgattgggaagtcttacaaaagatttcaagtcgtatcgtaaacgaagtagaccacgttaaccgcgtagtttatgacattacatcaaaaccaccaagcacaattgagtgggaataattatatatagcaaatgataggctggagttaccgtaattacacggtttccagccttttttattttgcgttgaatacgttttgaatacggtatgcttaaaaattgatgtattttgcgaatttatcagccacctgatcacgttgtttttcagttacgtgagcgtaaatatccatagttgtcttgatgtccccgtgacctaatctgtcttgtacttcttgaatagaaaggccagcctcgaacaaaagagaacaatgagtgtgtctaaaaccatgaactttaattctcttaaaactattcttctcacaaattaagtccaatgctttattgcaatgctcgggatatagtggtttattatcacgtacagtagtgaaaacatgttgatgtttatcagaggtattgtgaccatatttaagggactccactctttgatgagtgcgccatgatttcaatacacttgcagttttatcatcaatacttattgttctgtgagatgattttgttttaggctcttgtattaccagtttataatttgcacctcttgcgcaagtcttattaatagatatggtttgtttagtaaaatcaatatcgttccatgttaaagccattaattctccacgtctaaagccagtaaaagctaatgttcgaaaaatagcataatataatgggtcatcttcaacaaaagttaaaaactgtttcaattcatcacttgaataatactttgtagatgcgtcttgttgcgcttctttttttctaggtgcttttgtatgtgcaaacggattatcaacgattatcttaaggcttacggcatatttaaacacattagatgtgtatattcgtatagctttaatatcagaatactttttgttccatttattaataactttttggcaatatggaacggttattttcttaataggtacatcttggaaatgttctaatatagctgtatcaaataaagttaaaacacgttgatatgtgctttctcttacagtattttgatactgttcaagccacaactcatatacttctttaaacgtcgttatatcgttgtttagaaagccattttgacttacttctgtttgaagttttgcctcagcaattttagcttctctttcagtcttaaagcctcgtctagtggttctcttttgcttaccagtaattggatcagtacctaaatatgcgacaaacatataggcagtcgaaccgtctttcttcttatattttttaatcatataaatcaatcctttctattgcctgcaacgcgtgagattggattgacacgccgttaaggaatggctaccttgtggcgtgatgattaattagtgtctttttcaagtatgatttttttttgatgttctagtctatcaggatattcatataagtataatttatacattggcttacctttaatagcatcataatgatggttaggaaccaagcgtaacttttcacctaaataaatggattcttcttttagtttttctatttctgctaatgctttttttctatcgttatgagtttctaagttggtgaataatagttttaaatatttttcgtgaaattcaccaatttcttctattgttacttctctttttttatcgcttgattttcgagtatttgctaaagtctcgtaatttattattgatttttctgtatcagtggaaaggatttgtttgtacaacttaagtacgtaatcataatctatgtcatttacattgattttagattctttcaacaattccaacaatttgattgtttcatcatataaatcgtatgatgaataataaatgtcgccgtcattataataggctttattaacataactatacattttatcaaattttgcaaaatcatttaatgttggactataacctttttctttaaactcatctgatattctgtgtagaatatagctgggtatacctaaacctttaccgtagatttcaatttcatttactccaatgtttctgttgccgttctcgtgatttgaaatggtgttttgactaaatcctgtcctttcgctcaatttgctttgagttaatttcatgtattttctaagagttttaataattgtgccgtaatgtgttggtaattctgccatttgaccagctccttccatccaaatgatatcatatcgaaaaaaatatctcaatttgcaatatttaatgttgaaataaatatctcgatgtgagataatttgtttgaggaggtgagaatatgtttacgaaaaaatcagaattaaaacaacaatttttaaaacctaaaaccaaattgaaagaggagaggttaaaacgaggtctttctgctacttatttagctcaattaataggtattgatagaaggcaatatgaatctaaagaaaaagggttgttctcatttcatgactatgagataaaaattatttctgagttccttgatattgataaagaagtgttttttatctgaatataaatatctcaattagagataaaatggtaggagaggaataatatgagccaactacttagtgaacaggctagtcaacagttagttaatagtatagttgatattgccgaaaaaatagctttagaaaaagttaagcaatcacgtaagcgatatctcattcaaaaagaagtcatggaagaatacaacgtgactcacaaggttataaccgagtgggaaatgatgggacttcgtaaagttaagattggtaaaacaattcgctatgatcgacaagatatcgaaaatgtaattgaacaaatgaaaaattgaaacgcctgcaacgcgtgagaactctaacttatcaggaggcaaggcaatgaaattgaatttactgtatataactttaacatcgttattgacaattttattactcgcaatatctaacatgtatgttgcttttagtacttatgcattattgataactttaggatttaatctaacaggaggattagaaaatgaataatgaacaaaaagaagttatttaagacatctataatactttagaagcagtagcttataacacatcgatggaatacatccataattgcgtagatggtaagaaagaatggatagaaaacgtaaatcgtgaggaacacttacaagccataatcgagtgggcattacaacaaatagaaaataactttgatttttataatgatactgaagtggaggaattataaatgaattgggaaattaaaaatttaatgtgtgacattaaattgataaaagaaaaacttaatgatttaaatgaaacttatggttggtggattgaaaacacatatatttctagagatataacaacaataaaagaatatgaaagatactgccgagcttataccgaacatagaattctaaatgaacaagttctagagctttttggtatttatttaaatcgttttgatgaattaataacgaggtttgatgcattagaaaaagcgtcatctttcgccgaccaaagccaagataacgcataaaaaataaaaatttataaaaatataccatcaatattttaacattaattgcattgaaaatacagagaaatcagattagaaaggaggcattctgtggcaattaagaaaaaagatagtattattggcgttaaagaattagaaataccgcaagaattaaagttagtgcctaattgggtattatggcgagctgaatggaacgagaagcaacaaaattatggaaaagtaccatatagtattaatggttacagagctagtacaaccaataaaaaaacatggtgtgactttgaaagtgtaagtattgaatatgaagttgatgagcaatatagcggtataggttttgtattaagtgatggtaataattttgtttgcctagatattgataatgcaattgataaaaaaggacaaatcaattctgaattagcactaaaaatgatgcaactcacatattgtgaaaagtctccaagtggtacaggattacattgtttctttaaaggtaaactaccagataaccgtaaaaagaaaagaacagatttagacatagagttatatgattcagcaaggtttatgactgttacaggatgcacaattggtcaaagtgatatttgtgataatcaagaagtattaaatactctcattgatgaatactttaaagagaatttgccagtaaatgatgttgtgagagaggaatctaataccaatatgcaattatctgatgaagatattataaacattatgatgaaatctaaacaaaaagataaaattaaagatctattacaaggcacatatgaatcatattttgagagttcaagtgaagcagtacaaagcttgttacactatttagcgttttacacaggtaaaaacaaacagcaaatggagcgtatatttttaaactacaataatcttacggataaatgggaaagtaaacgaggtaatacgacttggggacagcttgagttagataaagctataaagaatcaaaagacaatttatactaaatcgatagatgaatttaatgttataccacaggggagtaaagatgttaaacagttgttgaatcaattggggcatgaagaaagaacaaaaatggaagaaaattggattgaagaaggaaaacgagggcgaaagcctacaacaattagccctataaaatgtgcatatattttgaatgagcatttaacatttatactttttgatgatgaagaaaataccaagttagctatgtatcaatttgatgaagggatatatacacagaacactacaattataaaacgagtgatttcctatttagagcccaaacataatagtaataaagctgatgaagttatttatcatttaaccaatatggtagatataaaagagaaaactaactcaccatacttaataccagttaaaaatggtgtatttaaccgtaaaacgaagcaactagaatcatttacacctgattatatatttaccactaaaatatctactaagtataatccgaatgttgtcagacctaatttgaatggatgggattttgatcattggttatatgagattgcatgtgctgataaagaaatagtgactttattatgggaagtcataaatgactcaatgaatggtaactacactcgtaaaaaggctattttctttgttggtgatggaaataatggtaaagggacgtttcaagaattaatatcaaatttagtaggatataaaaatgttgctagcttaaaagtaaatgaatttgaccatgaatttaaattaagtgtactagaaggtaaagcagttgtaattggtgatgatgtaccggtaggcattaatattgaagattcatcaaactttaaaagtgttgtcacaggggattcggttttagttaatgtaaaaaataaacaaccttatagaaccgaatttcgttgtaccgttattcaatcaacaaatggcatgcctaagttcacagataaaacaggtgggacaaacagaagattattaattgttccattcaatgctgattttaatgattcaaatgaaaatgttgatattaaagaaaaatatcttaaagataatcatgtacttgaatatgtgttgtataaagcgattaatttagaatttgataggtttacaattcctcaagtatctaaaaaaatgctagaaatatacaaacaagataatgattcggtttatgatttcaaaattgaagaatttgatcaatggaatattcaaaaagtacctaagaaagttgtttattacaggtatagagcattctgtgaagaaaatggatatatgggaaaaatgtcagacagaacattttatagacgatttgagaagtacttaggaaaagaatggaatacggatgctaaatgtagatattcaagtatcgatgaattagaagaaattgtaggatatatcaatagaacattaatgccatttggacaacagcatagatcatataaaaatgaaaatttaaaaatagtgtgactgagtgactggggtgagactggaattttttagttcagtcacacctataaacactgttgttacaggggtattaccataaaagtgactgggggactagaaatttcaaaaatactttataaaaaactaaaagaagataattgaagaagagtatataaataagtagtttgtgaaaatttcagtcactcagtcacaattttactgtaacctttggtattactgtgtttatagtgtgaccaaagtattttgttttagtcacaatttcgattatttcagtcacgacgaaattagaggtcaaaaatgactaatgaagaacttgcagttactcaaaattgcctaagttactaaaaaatggaattgtagtaacttttagtatctaacgtgggtgatttagtaactggatagattggaggacgagagtaacatgaatagaagtagaatgaaacaaatcattttagaatatataaagaacaatggcagcacttcgtttgtagagattgagaatgtatttgaagaacaaggttttaaatacaaaggtaacggcgcatataccagtggcaaccataagaatattatattttggatgggttggaatgaagaagcgtttaatattgtggcagatttaaaacgcgacgggctaattgaaatgcaaatttgtccgccaatgtactatcttattgatggtaaaggtctaaggctaccaattgtaaagaataaaaatataaaaatagatcattggctaccagtaacatttagtttagtaaattaaaacatgcagataagcatttaaaatatcaagtatagatatgggagtgtgtatatttattaatcataaaagaatcgcatatcaaataatcaaacatacacctgtgaacgttcaattaatgaatacgaaatatataaatcgcgttgtaaggcgctatacaaaaaagcgtgctgattttgaacttattaaaatgtacatctatcagattaaaaggagagaggcaagacgtgctagatcatacaaatgaatctgtaaaacgtgtgtttaagtatagagataagcaagaactattaaataagtatcacgaattattagacaaatactttcttcataacatttcgttctatgaagaagataaaaacaacgaacgtatatatggtttagttgttcatactaaaaacaaattaggagatgaagattatgaaagagtttaaagaacaatttgggtatcaactatctaactttgatgatatggatattaaaggatatgccaatctatatcaaaaggatataggtaaagatgtaagtatgattgaacaggggttaaagcaattaagtattactgaaacagaagttttattaccagagcaaattaacaaaaaattattaggagtgttaaatatgaatgaagtaaatcaatcaagtaatacatgggtaggtaccctaacaaaacaattagttagtagtgagaataactttaatattcaagagttaccaactgcacgtaaagaagtatttaaagagttattagtgaatcgtgagctacttcaaacattacgtgatgtgattactattacagatgatgaacatgttgaatctataccagcactaacatacattaaagataagttagctactaacggtattgagctatcacttaatggcagtagtaaatattttgatagacgtgagggacatatctacacagaagtatcagacagtgtagtgcatggctctgatagaacattagatgatctacttaaagagatatttattaatgagtgtgtctcatatgaaacaacattgttattagataagaataattcaagtggtttaattgataaaggtaaccaagacttatcactttataatcaaggtatcaaagaagtaagtaacacatcaatatacgatggtatcaagcaagcgatgaaagatataccacaaacgtttaggcgtaatgtatctattgtgatgaacacagaacatcatgataagctcatcaaagagttggcacagatgggattaggtggacttgcaggcgatttaagtaacctatttaatgtatctcacgtagtagttacagatgatgcacaagatatctttgtaggtgactttgggcatgccatatatgctaagtacgagcctattatgtataacaaaaagaaacaagcgttaaaaggtgtataccaatttgcattgaattacgtgttcgatatcaaaataattccagagttattgcgcatagttaatattaaataaaaaatatttaaataaaattttatacccccctgcccatcggcttaaaatgttttttcgccgggtaccggcgggggcccttcgcttgcaacgcggataaacttttatgaaagggggataacttgatttatccctttttcagatacttataaatattaaattcgatatgtaaaggtgtggttatttggtatctgactttgaaagcaatgataaaatcactgaagtagaacttttaatgcattacaatccgaaagtcattaatagcaaaattaaagcgatgagatcacaaatagaaagcttatatcacttgaacatgaaccatgtgatcacgaatgagaacgatatgctggtatctgtatcatatccattagataaattagtactttatattatagaagagaaagataaacttgaatattacatgaaaacggctcaggataggctaaatttgtttaaagatatcatcaaaaactattctaaaaatgaacgacaggatgttatgaggtacatgttaagtagtgggaaagttaaaaatgaaggagtcattgaacgtttaaaagtagatatttataaagttgaaagtataaaacgtcaagaacgacaaaacaagcgagaagaattacatcgaatagagtttgataagcatttagaacaagttaaaaaagaactttcatagatatacatgatattaacggaaatgtgcctatattcattaacattggtgaatgggacggagatgatgagaaattagataaggcagtgcaagatgtatctaacgctaaccctagtcatcctgtgattgtggatgatattccgttagaggactgattacagtaaaaacgattatcatattgagttagtgaggattagtttactaattcaccctagctttatattaaagcgttataaagataaaagggagaacacttattataattaatggactccctttattaataattattacagaaaaagttgtaaattaattaatttctgcttctatagtttttatttcatcaatatttataggtggtttttcagtattgtattcaaactttttagataaatcactttgatatgtggatccgtcattcattgttattttccaataaccacccgttttatcgcttgaacgatataatccatgtgtttgagttagctgatgacgaattttaaagtctaaagttgatatagctaattgttttttatcgaactttggccaatactttaaggggctatctttaccatgaaccttaacttttaaaggtagttctattggagtaggtaatttttcagtatttgtaacaccacttatttggaaatgaatccaagttccttcgctagtatgttggctttttttaattctttttgtgtttaagtcaactttttccccttttgaaaaagtagggctataataaggactcggaaaaattataaggctgatgctgccatctgtgttttttatacgcatagatcctaaggaattatctaaaacttcactatttgtaaaagcgtcagacccactactataccagtctagcaaatcctttatattatcatttgtagatgcttttgcagttttgattatttgattagatgataagggaacaggggtaaaacctgtagcgattgtcgcaagcaacaaagggcttacgatgaaaaatttcattagtaattttttattcatttttaattctccttcatttaaatgtgtaaacgtttacacatagaatgtataaatattatttaaatgaatcaattaaccatctctaaactattgtttaaatatatattaattagaaagtgtttgttacatagggagctatattaaaaaatatagatttaaacaacattttaaagttacaaatagcaaaaaacaaagtgtgagtggtcatttaaagaatattaattaatataagtttgaattagttatattctttaaagtcactttctagtggcgttttttatgctgagaaacgccctgtgttgcagtgggaaatgggaaccacgtacaaatatactttaactgtaaatgtggcgccttgaaataaggctttaaacatcgctggttaatcgattttcgagattggtcgtagattaaaacctgtgaaaaaaatggcttagcgcatggagaatttggtaattggttgaaaaatgtcaacttagatagaacacaagctcaccgtttaattaaagtttctgaagaaattaaagatgttggtacacaccaacatttaggtatgagagctttattggaaatagctagtttacctgtaccagaacgcaccaaagaacacacaacatcaaatggcgaaactaaaacgccagatgagatgacagttcgagaattacgagagttaaagaaacaacttaaacaacgcgatgaagaaaacgcacaacttcaatcacaaatgaaacaagcacaacgttcggaggagatagcgagaaagcaatataaatatgggttaaataattatatttttactataaaattttagacacacgacatttttttacaattaggaatcattttattgcacttaagaaattttggtaaagcgttatagtaagaactgataaaattaaaatgtaaaaattttaaaaggagtttttattatgaaacagcaaatgttatcaaaagtattattaagtacagtcgtagttatgggatcaatagcaggatcttctcttgtaatggatgacaacgctcatgctgaacaaaaaagtgataatatcgggaaactgaatcaaaaaaatgaaagtaccttgcatctttcatttgaaaagggtattaaagggactgttgacaaaaatggtaagttaacattatctgatggaaaaacgtcaaaagtgatgccaactaatgccaaagataaaaaaggtaacaatgttgttttggtttataaaaaggttaaagatggatttgatgttcaagtaattaaatctagtcaagagagaaaaactaactgggttaaatgtggtctaggaacagttggaggcgctggcactggtgggctaggcggtgctagtgcagcttcagttataccaggtttaggaactgttgcaggtgctattattggtggagtttctggtggtgccacaggtgccgcagcgtcatgtttcggttgataggagagtgaagtcatgaaaaactctatactttggcgaaagtcgtttattcctgtctattttatagttgcttttgtaatgttcttactttttaagttttatattagaactgataatttttcagtttatgttttgatagcttttatagtcattttaggttttgcttctattatatataactataatagacattaattaagttacaattataattattatattaatgaatccctgtggatttagaaataaggcaggtacttcggtacttgcctattattatatctctatacgataggaatcgactatatgacttactaagttttatagcaaattagacaattaacacataaggcatttaatattgagttgttatagtagttgtataatatatagctagttccttataacagcaaaaaaataattttgactataagattaaatataagaatataaaattaacagtagaaaccaattttagaattttaaaaattgaatgcattaattataagagtgtgaatatataaacaatgttattaattcaagatgcttagaaatcctctgtttctccttgagaaagagttttgtatataagttcagatgaagtatagttaattaattttcaaagcataacttaattcttagaaataacgcgaaatcattaaatataattaattttcttttaatatttttttaattgaatatttaagattataacatatatttgaagtgtatctagatactttttgggaatgttggatgaaggagataaaaatgaataagagtcgatttatttcatgcgtaattttgatattctcacttatactagttctttttacacccaacgtattagcagagagccaaccagaccctacgccagatgagttgcacaaagcgagtaaattcactggtttgatggaaaatatgaaagttttatatgatgatcgttatgtatcagcaactaaagttaagtctgtagataaatttttggcacatgatttaatttataacattagtgataaaaaactgaaaaattatgacaaagtgaaaacagagttattaaatgaagatttagcaaagaagtacaaagatgaagtagttgatgtgtatggatcaaattactatgtaaactgctgtttttcatccaaagataatgtaggtaaagttacaggtggtaaaacttgtatgtatggaggaataacaaaacatgaaggaaaccactttgataatgggaacttacaaaatgtacttataagagtttatgaaaataaaagaaacacaatttcttttgaagtgcaaactgataagaaaagtgtaacagctcaagaactagacataaaagctaggagttttttaattaataaaaaaaatttgtatgagtttaacagttcaccatatgaaacaggatatataaaatttattgaaaataacggcaatactttttggtatgatatgatgcctgcaccaggagataagtttgaccaatctaaatatttaatgatgtacaacgacaataaaacggttgattctaaaagtgtgaagatagaagtccaccttacaacaaagaatggataatgttaatccgatttttatataaaaagtgaaagtattagatatatttgaaaggtaagtacttcgatgcttgcctttttaggatgcatatatatagattaaaccgcacttctatattaatagaaagtgcggttatttatacagtaaatctaaactataataattggaatcatctttttgaaatttcgacatctagatgaaattgtgttgaatcaacagttttattatctttgtaaatttttaagaagctttctggaagaccgtatcctgtgtaaaataaatcatacgagaaattagaaccatcattcatatggaatactacactccccttatcaaaaccgctataaaattttgaagaagtgccgtattctttacctttaccagtatcattgtgtccataaatattaaattcatcttgcaagtattttcttagtttgacatctatttcttgtgcggtaaccatttttttatctgtagaaacacttttagttgtaactgtttgatgcttgccattgataattaaatttataggtattattcttggcgaatctaatttattgttttctgctttagtaacaccgccatatatagtacgagagttataaccatatttatagcttataccaaaaacatcgacattttttccctttagatcactagttatatattcattgtcaaattcagcatacaatgtatcatttttatacgagtattctaagcggtgtgattctggtgaatttttgtctttaacattctttaaattcacatattcatatttagtataaaaatttcttaggtttcctggacctacatcgccgttagataagactgtatgattagaagaaaaaataaataaagtaataacaattacaaataataatctttttttcatattaggcacttccttttcattatatttacaataacattataaatataagttgaataataaattttagaaaattcataaaaaatacaaaaggttataaaggaagagttatagaaaaatatgtatcatcccacacgttgcaggcagtgaatacgtaattgaatacgttaattatgaagtgatgttaattgatgtgaagtatatagttattaaaacactgtaatatcaattgttataaattaatataaactaacgaaaaacacttatttcattgagtgggaataattatatataataaaaccacctgtttacacgggtggtttttaatttgagtagttggaaaattacaataaggacggaaaaggggtaaggtgttctaagtttgcgttttaattcatcaataaggcaattttccgtgtttatttttatataaaatttcatattgtttaggatcttcttgttttaaatcataaattatagtttcgtctactattttttctaattcaagtgtattaaagctccagtcatttgttgttattataaatattttttggactgggttgttatttatatgattaattagcctaggagtatctgtttctattattagagcagattctacaggatagtaaatagcaaagtctccgtgataaattgtgtttctttcatagaggttaacctctaaggttaaattactcaatttgaagattgtgttttgagttatatttttaggaataattcgattatctactatttgttttaggttgcctattgaacgagtgtgtatcgtcccttttgtgtaatcggaattatttaaagctcttaaaacagttgttaatttatactcgttaatataaccctttactaaagccatccgtttatcgctacctataaaatctttcagttttttgttgtgcataatattttatcctttccattagttgattgttttcatttgttcgaatctctatctatttactcggatacagggctgtgtatttgaagagtaatattatgattggaataaccaacgcgttccgtattcgttttgagtgactcagctagctacgataatagtgacatgtggcttataacacattgtgtaatttattgtgtgttttgtgatgtctatattggttgcagattgttgtatatttcacttaaagggcatttatataaaaaaagaggccagatgacgtatcatctgaccttcagctaaaacgctgagaatatgtcattcttcaagagaatgaagccggaatggttaccgggaatttgtaaatcaattatatcagatgtaatattacaattcaattagaaaagaactttatctttaattgcttttcgatttcattcatgtcatcttctgaaattattatcgttccagtaggatcagaatcatttattttgcttatacgtcttttgcttattgttgtaattgctgatatattaacgtatgtatctttccctttgtgcttggaataaacacctatcactctatacagttcattagctttttgatttaagttagacaaaagctttttatcttctgtgctaagtttaatgtcaatatctctatatttttgggctaatgcttgtactttaatactgatatcgataatctgtttttttaaatctgttgctgttagatttagcaccgattcgtttaacttcaaataatttttattacctttggaagaaagtggaactattgtaactgtttcttttcctttattgtctttgttatctaatattacacaaaaatgattaccagaaaactcacttccaatattactccctagttttacatataccactgttcctctactatatgatttataatatctttttttattgcttgtaacatcgctatgtatagcaattgaataaaactctagccaatgaggcatgtatataactttcaagtttttactatcggattttgaataagcttgttttagttttttgtttgacgtatttaatttactatttgcttgattgatatttttagacattaaatagtgttctcctaatcaatttattcttctttgatatcagcattattagcactgaaattaacatgaataatacgaaaatagatgttactataaaaccaacaatttttattaagtggaactcatcaattttgtatttagcaaatttcgcaatgacctcctatttattcgctttttatagttcatgtatgtgtgaaaaaacctatattgaacatctaattataagtgaattcctaatgctaaaagcaatctaacttacttaaatattattatgagtttttattgaaattaaataaatttaaactatttcttagtctctccatatcgttggaagttggttctttatataatcagataaattagaatcttcaagtaatgtatctttaaaaagttcagtttctaaatcaactctaaaatttgctttaaaacatcattttccatttttaaatgttgaatttctttgcgtaattttattaactctttttcaccactttttaaattatcttgatgattgaaggatccagtattttggtgttgttttatcgaatttgagaaaattgagggttttaaatcatactccgtataatttcattcttaagcttaccattttcatataatctaaccacttgtaacttaaactctgaactaaatgttcttctttcttttgtcataataaaattgactactttcttaatttaacaatatctattctcatagaatttgttcaattaagtgtagacgattcactgacacatcataagtacgtatggaattttgatcgttcattgttattggtttatgttttaggaaatgtgctattgaagggtttaaagatgattggaatttcttggtttcttgacttatatagttatgaaagagggcgttgtcctttattaaatttctgagatcagaaatgctataaataaaatgattaagattttttgttttcatgtaatttaagaaatggatttgttttttgtgggttatttttaattctattatgaaatggtttgaattttgcagttgcaaaaatgatagctgcttcttttgacaaagttatagaacctttttcttctggtaccatgacaatcactccttatgcattttgtttttaatattataaaataattttactatacaaaataggttgtgtaaatagtttcttattgttaccaaatggtttgtttgaaagcattatgcaatgctaataaacactaatatcttgtacttatttccatttgaataaattgttagcattattatcatttaagttctgtaatgcatattttaaaaatacagtttacatggaacgttgtggcatatattctgtatatagaagtgtaaaaacacaattgggttggtagtcccaatgcagttttaaaactgtcagtaaccttcctcctcgggtcgtccgtcatttctaattaaactagaggagggatagcatggagctatctattttttacaatgggcaattttttgtagcattagtagaatatagaatggaaaataaatctaaatttatccaatacacatttgggaatgaacctgatgatatagaggtattggattttattcatcatcaattagtggaaatgattgatgatgtgcaaactattgtttatacaaaaaataaatctagaaaagtaaatccgaaaaagctacaaagacaaattgctaaggagcaaaagaaacctaaatactctacccaagcacaaatagctattaaggaagaattagaattaaagaaaaagcaaaagcggaagaactataaagaaaaacgtgatgcatttcaaaaaagaaaaagagaaattaaaaaggttaaagcaaaagagaagcataaggggcattagcaatacgacaaataaattaaagcaaaatgatttataggtggttgggatgattttaattagttcgtgtttgataggcgaaaatgtaagatacgatggtggcaatcaattggatgttagattgaaaaaattaatagacagcggaaaagctattcacgcatgtccagaattgcttggtggattgttaattcctagagaacctgcagaaattattggtggagatggttttgatgtgtggaataacgctgcaaaggttgttactatttctaacaaagacgtaactgacgattataaacatggagcgatagttacgctaaaaattttgaaaaaatatcaatgtgatacagttattttaaaagtaaatagtccatcttgtggatctcaagagatatatgatggaaactttacaggaaataagaaaaagggtgtaggtgtagtgactgcttcactcattaatgaaggtataaacgtttatgatgaaaatacgttttttgaccaaaaaatgattgaaacgatagtacatgaaaagtaagtattgagaatatacgtaataaaccaaacatttaagttgtgagatactttataaaatatttctaaaaatagttgaaagtatattcaagttgtgataatatataggtacagataattttgttaacagatccatgagagtaggaaccccaccatacgggaatttcgaaatcatggattttttgatataaaggagtgatgtaatggaaaaagtagccattttagtagatggtggatactatagaaagataagcgcaaaagtctacggaaaagttacagcgaaagaaagagctgacgagttatatagttattgcaatagacaattaaaagagacacatttcaaagaagaaatatataataaattatacagaatattttactatgattgtcctcctattgataagatagtttatcaccccttattaaaaaagaatgtaaatttttccaatactgatacgaaaaagtggacagaagactttttcaaagaaatgagcaaaaaaagaaaggtagcattgaggttaggagagttgagtgagtattcagttgaatacaacttaaaatactctattacaaaaaaattattaaatggaagtatcgatttaaatgatttgaaagaaaaagatttttccctctcattacaacaaaaaggtgttgatatgaaaataggtttagacatagcttcattatcatttaaacaccaagtagataaaattatattaatagctggtgatagcgattttgtacctgctgctaaactagcaagaacagaaggaattgattttgtattagattctttaggggcagatattagaaacaacttgtcattacacattgatggtaggcgtacttgtgatgaaaaatttaaattttatttaaatcaactatttaaataataatttttttaaaacgcaccttctactttacggacgtttatagctatcagtatttatcagctaaaaattaaaacagatatgggttttcttcattaaataatttttctatatagaaagagaggcaacgcaactgtcacctctacttgaaataattaggatgaaatactctgagtctaaagtccacaccttaatcacccaaatcgctcaaatcctcaaccccggactacatctccaaccccctaaacaccaatacttaccaaagcattgatatgagtgccaatactggcaatgtgccttgtttgaaaaagatactaatattgcttgaaaggccaccataaatagcaacgccaatgatatacactaaaatagctgcgcatatttcttttggattactgctgataaacaaaccgtatattagcaaaactccgattaaaccgttagatacgccttgattcttcaaaagtacgttaatatttttgtctttcaatttgctaacgctaatactaaatgtttcacttgtttttcttgaagttgtagcaatcgtttcaaggtacataatatagaaaaattctattgctacaaatatgactaaaattgtcgagatgatattcactgtaacgctcctttagtattaaatattttcttgtaaaaatgattgcagtgtctgtggttgatcattgactaattgttggaaatcattggattcttggtctaatagccctcttgctcctgcgtcgtacattgatgccaataatgcaccaaagcctttaggttcatcgtacatttctgcaaatgtctctaatgaaacgggttcatatttaatttctgtgcctgatgcctcagataaaatagcagcaagttccttcatatcataactgtagcctgataataaataacgtttgccccaagtatctggatttttaataatagcaatgacacttctagcaatatcatttctagtaatataattaatacgaccatcaccagctggataaatcagtttgtgcatattcatcaattctggtaaatatggtttaagtggatccatgtacattgccattcttacatacgtatagtcaatgccacttgttgccaatagacgtgctgcataaccaaaataaggactcatatggaatggattattatgctgatctgcgtaataacctatgaaaatgatatgagcaacgccactttgctttgccgcatatactaaattttccacttcaggaatacgtttgaatgatggatggataatacttggaataaacacaacggtatccattcctttaaatgcttctaccatgctttcttgattaaaataatctaattgtcgaacagaaacttttccacgccaatcttctggaactttctcaacatttctaacaccaatgtgaaaatgatctatgtgatttgcaatggcttgatttgtaatatgtgtgcctaaatgacctgtagcacctgttaacataatattcattcacttcatctcctaatctttatatacataacataatacttattcgatgattttcaaaacatttgattttataaaaaattgtaatctgtatttattatcgccgtgtatagtaaatacgtatatgttattaatgttaaaaacactgtaatgacgcgttttagttgatatgtgtcaccatgagctttgaaaattttgacatggtactgcgacgatatggtgtcatttttgtgtctgaaagttttacagtttttaaaataaaaatggtataaagtgtgaattgtataaaaaaagagtctcgtaggataagaattgattaataacagttagcattttattaattaccttaacaatgattcaattttagttaaatgaggtttaatttgaaagggaatagtgcctcaatataatgtaggtagattgttcatattacgtaattgaaaaatcaaatttaaatagattggggctaaaaattatgaaatttaaagcgatagcaaaagcaagtttagcattgggaatgttagcaacaggtgtaattacgtcgaatatacaaccagtacatgcgaaaacagaagtaaaacaacaaagtgaggctgatttaaaactttattataatggaccaagttttgaatataaaaaagtaactggatatggatttattgaaggtaaagatagattcattgattttatatacaatggacaatataataaaatatctttagttggttctgataaagataaatataatgaagaagttaacccagatatagatgtgtttgtcgttagagaaggaaatggtagacaagctgataatcattcgattggtggcgtaacaaaaactaatagaggagtgtattatgactatatacacacaccaatccttgaaatcaagaaaggtaaagaagaaccacaaagtagtctataccaaatttataaagaagacatttcgctaaaagaacttgattttaaattaagaaagcaattaattagtcaaagtggcttgtattcaaatggtcttaaacaaggtcaaattacaattacaatgaatgatggcacaacacatactatcgatttaagtcaaaaacttgaaaaagaacgtatgggtgagtcaatcgacggcactaagattaataaaattctagtagaaattaaataatacattctaacagcaaagcgctatgttgaatagtgcttgttatggaaactatggaagttaagcgacgtactgttgcttagcttctttttttgagggtcaaagttacctgacaacacacgcaatcacacgcagtactcattatcttttgcttaaatagcttaatcatattttatgaatagttaaaaacaggttaatgtgaatatctgaatacagctcctataatatgggtgtatggttcaaattacgtaataaaacaatctaattataatagattggagcatacaactatgaaaatgaaaaatattgcaaaaataagtttgttattaggaatattagcaacaggtgtaaacactacaacggaaaaaccagttcatgccgaaaagaaacctattgtaataagtgaaaatagcaaaaaattaaaagcttattatactcaacctagtattgaatataaaaatgtgacaggttatatcagtttcattcaaccaagtattaaatttatgaatatcatagatggtaattctgttaataatcttgctttaattggcaaagataagcaacattatcatacgggtgtacatcgtaatcttaatatattttacgttaatgaggataagagatttgaaggtgcaaagtactcgattggcggtatcactagtgcaaacgataaagctgtcgacctaatagcagaagcaagagttattaaagcagatcatattggtgaatatgattatgactttttcccatttaaaatagataaagaagcaatgtcattgaaagagattgattttaaattaagaaaataccttattgataattatggtctttacggtgaaatgagtacagggaaaattaccgtcaaaaagaaatactatggaaagtatacatttgaattggataaaaagttacaagaagaccgtatgtccgatgttatcaatgtcacagatattgatagaattgaaatcaaagttagaaaagcataacacacatacttgacgacgaaataagttgaaattgaaatagagaggttaagtgacaatcaaacgttgcttaacttctttttaatgcttaaaaatcatttcaaaggcacatagaagcgctatattaatctcataatcactcattattttttgcttaaattacttaataatacttcaataattgttaaaaggggtttaatgtgattatcttagaacgccatctataatgatgttgtatgactcaaattacgtaaaaagacaatcgaatataatatagattggagcatacaattatgaaaatgagaacaattgctaaaaccagtttagcactagggcttttaacaacaggcgcaattacagtaacgacgcaatcggtcaaagcagaaaaagtacaatcaactaaagttgacaaagtaccaacgcttaaagcagagcgattagcaatgataaacataacaacaggtgcaaatacagcgacaacacaagcagctaacacaagacaagaacgcacgcctaaactcgaaaaggcaccaaatactaatgaggaaaaaacttcaacttccaaaaaagaaaaaatatcacaacctaaacaagaagcgcagaaatcgcttaatatatcagcaacgccagcgcctaaacaagaacaatcacaaacgacaaccgaatccacaacgccgaaaactaaagtgacaatacctccatcaacaaacacgccacaaccaatgcaatctactaaatcagacacaccacaatctccaaccataaaacaagcacaaacagttataactcctaaatatgaagatttaagagcgtattatatgaaaccgagttttgaatttgaaaagcagtttggatttatgctcaaaccatggacgacggttaggtttatgaatgttattccaaataggttcatctataaaatagctttagttggaaaagatgagaaaaaatataaagatggaccttacgataatatcgatgtatttatcgttttagaagacaataaatatcaattgaaaaaatattctgtcggtggcatcacgaagactaatagtaaaaaagttgatcacaaagcagaattaagcgttactaaaaaagataatcaaggtatgatttcacgtgatgtttcagaatacatgattactaaggaagagatttccttgaaagagcttgattttaaattgagaaaacaacttattgaaaaacataatctttacggtaacatgggttcaggaacaatcgttattaaaatgaaaaaaggtgggaagtatacgtttgaattacacaaaaaactgcaagagcatcgtatggcagatgtcatagaaggtacaaatattgataaaattgaagtgaatataaaataatcatgacgttctctaaatagcagctgacatcggtaaaacaagaagttaagtgacaatggtttacatgttacttagcttcttttattatgcgcaatgatgtaaaaagacgaatattcatttgtttgtaaaagtggcatttctatgtcttaaaagtgacgaaacctcaaatgtgccaagtgttgaatcacatcaaaatcatttttatttaacgaacattatgggtttcttaatttacttaacgatgattcaaatatagttaaacaaggtttaatgtgaatggagcaatacgccatctataataaagctgtatgattcaatgaatgtaatcgaacaaatctaataattacgaatggagcatacaactatgaaaataacaacaattgctaaaacaagtttagcactagggcttttaacaacaggtgtaatcacaacgacaacgcaagccgcaaacgcgacaacaccatcttcaactaaagtggaagcaccgcaacaagccgcaaacgcgacaacaccatcttcaactaaagtggaaacaccgcaacaaacaccgaacgcgacaacaccatcttcaactaaagtggaagcaccgcaacaagcagcaaatgcgacaacaccgtcttcaactaaagtggaagcaccaaaacaaacaccaaatgcgacaacaccatcttcaactaaagtggaagcaccgcaacaagcagcaaatgcgacaacaccgtcttcaactaaagtggaagcaccaaaacaaacaccaaatgcgacaacaccgtcttcaactaaagtggaaacaccgcaatcgccaaccacaaaacaagtaccaacagaaataaatcctaaatttaaagatttaagagcgtattatacgaaaccaagtttagaatttaaaaatgagattggtattattttaaaaaaatggacgacaataagatttatgaatattgttccagattatttcatatataaaattgctttagttggtaaagatgataaaaaatatggtgaaggagtacataggaatgtcgatgtatttgtcgttttagaagaaaataattacaatctggaaaaatattctgtcggtggtatcacaaagagtaatagtaaaaaagttgatcacaaagcaggagtaagaattactaaggaagataataaaggtataatctctcatgatgtttcagaattcaagattactaaagagcagatttccttgaaagaacttgattttaaattgagaaaacaacttattgaaaatcataatctgtacggtaacgttggttcaggtaaaattgttattaaaatgaaaaacggtggaaagtacacgtttgaactacacaaaaaattacaagaaaatcgcatggcagatgtcatagatgccactaatattgataacattgaagtgaatataaaataatcatgacattctctaaatagaagctgtcatcggaaaaacaagaagttaagtgacaacggcctacatgttgcttagcttcttttgttatgttcgatgatttgagaacccgaattttcgatgggtccatatatgacgtggaagagtcctgaatttatctgtaaatccctatctatcgggtgtgtagcacaacgggatcagttttatttaacgaacattatagattccttaatttacttaataatgattcaatgattattaaagatggtttaatgtgaaaggtcaaatacgccaattataataaagctgtatgattcaatagacgtaagcgaacaaatctaataattacgaatggagcatacaactatgaaaatgacagcaattgcgaaagcaagtttagcattaggtattttagcaacaggaacaataacatcaacgcatcaaactgtaaatgcaagtgaacatgaagcaaaatatgaaaatgtgacaaaagatatttttgacttaagagattactatagtggcgcaagtaaggaacttaaaaatgttactggttatcgttatagcaaaggtggcaagcattaccttatctttgataaacatcaaaagttcactagaatacaaatttttggtaaagatatagaaagacttaaaacacgtaaaaatccaggtttagatatatttgtagttaaagaagcagaaaatcgcaacggcacagtgttttcatatggtggtgtcactaagaaaaatcaaggtgcttactatgattacttaaacgcacctaaattcgttattaaaaaagaagtagacgcaggtgtttatacgcatgttaaaagacactacatttataaagaagaggtttcacttaaagaactcgactttaaattgagacagtatttaattcaaaattttgatctgtataaaaagtttcctaaagatagtaagataaaagtgataatgaaagatggtggctattatacgtttgaacttaataaaaaattacaaacaaatcgcatgagtgacgtcattgacggtagaaatattgaaaaaatagaagccagcattagataatttaatgaaatatggataatgtaaaatatggatagtatagaggagttaggcaacataagttgcttagcttcttttttgtgttggtgagatgaaaatgagaagcgggttcatgatcaaaattttggaaaacggttgatacctatagtcgcgcgttgtccttttagtgacatgaaacaatgtggaaaacataattaaattgagggaaagtgtgaaatgtgaaaaaagctgcgttaagtttaaaaaatagattaacgctgttaggattccattaattagcttaacattggttcaggaatagttaaaatgaggttaattcatagcttagtatcccgcttatataatgatagtagattgttcgtattacgtaattgaaataatcatataaaaatatattaagacaaaatttataaatagattgggagaatagtactatgaaattaaaaacgttagctaaagcaacattagtattgggattgttagctactggtgtaataacaacagaaagtcaaacagtaaaagcggcagaatcaactcaaggtcaacacaattataaatcgttaaaatactactatagcaagccaagtttagagttaataaatgtagatggtctgtatagacagaaagtgacagataaaggagtatatgtttggaaggatcgaaaagattattttgttggcttgcttggtaaagatattgaaaaataccctcaaggtgagcatgataagcaagatgcatttttagtcatcgaggaggaaactgttaatggaagacaatattcaattggtggtttaagtaagacaaatagtaaagaatttagtaaagaagtcgatgttaaagtaacaagaaaaattgatgaatcatcggaaaagtctaaagatagtaaatttaaaattactaaagaagaagtctcgttaaaagagttggactttaaattaagaaaaaaattgatggaagaagaaaaattatatggtgctgttaacaatagaaaaggtaaaattgtagttaaaatggaagatgataagttttatactttcgaacttacaaaaaaattacaaccgcatcgcatgggtgacacgatagatggtactaaaatcaaagaaattaatgttgagctagaatataaataatctttggacaagcagactagtaattatagggaagttaagcgataacatattgcttagcttcttttttgtgttgttatgatgaaaaaaggagcgagttcatgatcaaatttttgaaaaaacggttgatacctatagtcgcgcgttgtccttttcgtgacatgaaacaatatggaaaacattattaaattgagggaaagtgtgaaatgtgaaaaaaacagcgttaagttataaaaatagattaacgctgttagattttcattaactaacttaacgttggttcaaaaatagttaaaaagaggttaattcatagcgcagtatctcacttatataatgacagtagattgttcgtattacgtaattgaattaatcatataaaaatatattaagacaaaatttataaatagattgggagaatagtactgtgaaattaaaaacgttagctaaagcaacattggcattaggcttattaactactggtgtgattacatcagaaggccaagcagtccacgcaaaagaaaagcaagagagagtacaacatttatatgatattaaagacttacatcgatactactcatcagaaagttttgaattcagtaatattagtggtaaggttgaaaattacaacggttctaacgttgtacgctttaaccaagatggtcaaaatcaccaattattcttattaggagaagataaagctaaatataaacaaggccttgaaggccagaatgtctttgtggtaaaagaattaattgatccaaacggtagactatctactgttggtggtgtaacgaagaaaaataaccaatcttctgaaactaatacacctttatttgttaaaaaagtgtatggcggaaatttagatgcatcaattgaatcattttcaattaataaagaagaagtttcactgaaagaacttgatttcaaaattagacaacatttagttaaaaattatgatttatataaaggtacgactaaatacggtaagatcactttcaatttgaaagatggagaaaagaaagaaattgatttaggtgataaattgcaattcgagcacatgggcgatgagttgaatagtaaggatattcaaaatatagcagtgactattaatcaaatttaaagtaagtaatcaatgactctaaagtaataaatttgaagcagcttaacgatgaaatgttgaataaatacgtacatcctccaaaaaggggcgtatctaaatcaacagtgtcgttaggctgttttatgttttataacgcaggttatgagtgagcatactaaaaattcacattactcttgaaagtgatgtccattgaatattaattagaacttcattaaccatgatttaagtttaattaaacgagtgttaatgtcagtctgtctcaatgccctttataataaatgtgtattattcaaattacgtaataaaagcaatccaatatattaagattggagcacatgaatatgaaatttacagtgatagctaaagcgatatttgtattaggaatattaacaacaagtgcaatgataacagaaaatcaatcggttaatgcaaaaggaaagtatgaaaaaatgaaccgtttatatgatacaaacaagttacatcaatactattcaggacctagttatgagttaacaaatgttagtggccaaagtcaaggttattatgactctaacgttttgctttttaaccaacaaaatcaaaagttccaagtgtttttattgggaaaagatgaaaataaatataaagaaaaaacgcatggcctcgatgtctttgcggtaccagaattagtagatttagatggtagaatatttagcgttagtggtgtaacgaagaaaaacgtaaagtcaatatttgagtctctaagaacgccgaacttactagttaaaaaaatagacgataaagacggtttttctattgatgaatttttctttattcaaaaggaagaagtgtcattgaaggaacttgattttaaaataagaaaactgttgattaaaaaatacaaactgtatgaagggtcagctgataaaggtagaattgttattaatatgaaagatgaaaataagtatgaaattgatttaagtgataaattagatttcgagcgtatggcagatgtcattagtagtgaacaaattaagaacatcgaagtgaatttgaaataatcaatgatatatagaataaaagcttaagaagcggtttaataaccccatgtttaatgatattgatacgtgtttttataataaaaacatatcgaacattgactacgttattaagctgcttttttgtacactttataacgaatagcttaagacttaaaactaatcggaatgaacaatgattcaacaaaaaaatatttatgttgctattaaaaatcagttaatacgaatgttaaaatacgtttgattttcattaataatgattcaagtttatttaaatgagcgttaatgtcagtctgttttgatgcaccttataataaagacagatagttcaaattacgtaataataacaatccaatatatcaagattggagcaaataaatatgaaatttactgcattagcaaaagcaacattagcattaggaatattaactacaggtgtgtttacagcagaaggtcaaactggtcacgcgaaagtagaacttgatgagacacagcgcaaatattatatcaatatgctacatcaatactattctgaagaaagttttgaaccaacaaacattagtgttaaaagcgaagattactatggctctaacgttttaaactttaaacaacgaaataaagcttttaaagtatttttacttggtgacgataaaaataaatataaagaaaaaacacatggccttgatgtctttgcagtacctgaattaatagatataaaaggtggcatatatagcgttggcggtataacaaagaaaaatgtgagatcagtgtttggatttgtaagtaatccaagtctacaagttaaaaaagttgatgctaaaaatggcttttcgataaacgagttgttctttattcaaaaggaagaagtatcattgaaggaactggactttaaaataagaaaactattaattgaaaaatatagattgtacaaaggaacggcagataaaggtagaattgttatcaatatgaaagacgaaaagaagcatgaaattgatttaagtgaaaaattaagttttgaacgtatgtttgatgtaatggacagtaagaaaattaaaaacattgaagtgaatttaaattagttcgagttaatagcataatagcttaagaagcggcttaacgacaaaatgtgaattgacatccgtgtccttatataaggaactgtgttaaatacattactgttgttaagttgtttttgtaattcaaagagcagaacaccataacaaaagtagttgtagtgaacgataatccagtaaaacaactaaatgaaataatgaaagtcatttaacctgaacattaaaatatatttgtttttcattaagaataattcaagtatatttaaatcgaggttaattatcgtatgaaatgatgcacgttataataataatgtatgattcaaattacgtaatgaaaacaatccaatatattaagattggagcaaataaatatgaaatttacagcattagcaaaagcaacattagctttaggaattttaacaactggaactttaacaacagaggctcattcaggtcatgcaaaacaagagtcagtaaacaaacatgacaaggaagcattatacagatactacactggaaagactatggaattgaaaaacattaatgctttgaagcatggtaaaaataacttgcgttttaaatatagaggcatgaagattcaagtattgctgcttggaaatgataaaaatagatttcaacagcgtagttataagggcttagatgtgttttttgttcaagaaaaaagagacaaacacgacatattttatactgttagtggcgtaatacagacgaataaaacatctggagttgtcagtgccccaatattaaatgttacaaaagaaaagggtgaagatgcttttgtgaaaggatacccttattatattaaaaaagaaaaaataacattaaaagagttagattttaagttgagaaagcatctaatcgaaaaatatggactttataaaacaatctcaaaagatggtagggttaaaattagcttgaaagatggcagtttttataaccttgatttaagatctaaattaaaatttaaatatatgggggaagtcatagaaagcaaacaaattaaagatattgaagttaacttaaagtaaataattacgaataataaaaaataattgaagcggcttaacgatgaaaagtaaattgatgcgcataccttataaaaaggatgcatcaatcgatatcgtcgttaagctgttttggtttatcctatcccaatctccataaatataaaaatttccacaaccaacctcaaaattctcaacatcgcaacataaccaaatgttataataaatctattacacaaagagataaattacttattcaaaggcggaggaatcacatgtctattactgaaaaacaacgtcagcaacaagctgaattacataaaaaattatggtcgattgcgaatgatttaagagggaatatggatgcgagtgaattccgtaattacattttaggcttgattttctatcgcttcttatctgaaaaagccgaacaagaatatgcagatgccttggcaggtgaagacatcacgtatcaagaagcatgggcagatggagaatatcgtgaagacttaaaagcagaattaattgatcaagtcggttacttcattgagccacaagatttattcagtgcgatgattcgtgaaattgaaacgcaagatttcgatatcgaacacctggcgacggcaattcgtaaagttgaaacttcaacactaggtgaagaaagtgaaaatgactttatcggactgttcagcgatatggacctaagttcaacgcgtttaggtaacaatgtcaaagaacgtactgcgttaatttccaaagtcatggttaaccttgacgatttaccatttgttcatagtgatatggaaattgatatgttaggtgatgcatatgaattcctaatcgggcgctttgcggcgacagcaggtaaaaaagcaggcgagttctatacaccacaacaagtatctaagatactggcgaagattgtcacagatggtaaagataaattacgtcacgtgtatgatccaacatgtggttcaggttcattgttgttacgtgttggtaaagagacacaagtgtatcgttatttcggtcaagaacgtaacaataccacatacaacttggcgcgtatgaatatgttattacatgatgtacgttatgaaaatttcgatatccgtaatgatgacacgttggaaaatccagcctttttaggccatacatttgatgcggttattgcgaatccaccatatagtgcgaaatggacagcagattcaaaatttgaaaatgacgaacgatttagtggttacggtaaacttgcgccaaagtctaaagcagactttgcctttattcaacacatggtacattacctagatgatgaaggtaccatggcagttgtactcccacatggtgtcttattccgtggtgctgcagaaggtgtcattcgtcgttatttaattgaagaaaagaactacttagaagccgtgattggcttaccagccaatattttctatgggacaagtattccaacatgtattttagtgtttaaaaaatgtcgccaacaagacgacaacgtgttatttatcgatgcatccaatgattttgaaaaaggaaaaaatcaaaaccatttaagcgatgcccaagtcgaacgaattatagacacatataagcgtaaagaaacgattgataaatatagctacagcgcgacattacaagagattgccgataacgattacaacttaaacataccgagatatgtcgatacattcgaagaagaagcgccaattgatttagatcaagtccaacaagatttgaaaaatatcgacaaagaaatcgcagaaattgaacaagaaatcaatgcatacctgaaagaacttggggtgttgaaagatgagtaatacacaaacgaaaaatgtgccagagttgagattcccagggtttgaaggcgaatgggaagagaagaagttaggggatcttggcctgtttcaaaaaagttattctttttcgagagctaaagaaggaaacggtaaaactaaacatattcattatggtgatattcattcaaaatttaaaacagtcttagatagtgatggtaatatccctaatataattgagaaagctgtatttgagttgattcaaaaaggagacattgtttttgcggatgcatcagaagattatagtgacctaggaaaagcagttatgatagatttcaaaccgaattcattgatttctggcttacatacacacctatttagaccgcttaacaatgcaatttctaattttttgattttttacacaaaaactctgagttataaaaaattcattagacagcaaggtacaggaatatcagtacttggtatatcaaaaaaaagtttattaaatttgaatgtattaataccacgaagtgaattagaacaacaaaaagtaggcaagttcttcagcaaactcgaccgacaaattgaattagaagaacaaaaaatcgaattacttcaacaacagaaaaaaggctatatacagaaaatcttctcacaagaattgcgatttaaggatgagaatggagatgattatccggagtgggaagaaactactataaaagaaattgctcaaattaacacaggaaagaaagatacaaaagatgccattactaatgggagttatgatttttacgttagatctccgatagtttataaaattaatacttttagttatgaaggagaggctattttaactgtaggagatggagttggcgtaggtaaagttttccactatgtaaatgggaaatttgattatcatcaaagagtatacaaaatatctgactttaagaattattatggattattgttattttattatttttcacaaaactttttaaaagaaacaaagaaatatagtgcgaagacatcagttgattcagttagaaaagacatggttgctaatatgaaagtaccacgtcctatttatatagaacaggaaaaaatcggtcaattcattaaaaaagtagacaacaaaataaaaattcagaaacaagtgattgaattacttaaacaacgcaaaaaggcattacttcaaaagatgtttatttaagtctacaggaccttgttttaaaagtaataatggtgtttttcttatactcttaataattggtttcaattaccagaattataaaatcaaagtaaatcaaatacgaacattaaatttaggcactgtgaaagcacggtgtcttttttgtgtcgaaattgtgtacagaataagtagttaaataaagattaagttgagataaagtgttattcgtaaataaaagagagtagatcgataggaattgaatgatattagttaactatttattaaattacttaataatgattaatttttagttaaagtaagtttaatgtgaagcacgaccgttgctcattataatgaatgaggattgttcgtattgcgtaatagaataaatcaaatagactaaaaattgggagcatagaattatgaaattaaaaaatattgctaaagcaagtttagcactagggattttaacaacagggatgattacaactactgctcagccagtaaaagcaagtacattagaggctagatcacaagcgactcaagatttaaaagattattataaaggacaaagttttgatttgaaaaatataggaggatataaggaagggaacaaggttactttcatatatcacaatcaacaaattgatgtgacactaacaggtaaagaaaagctagaatttaatgacgatgaagaaatatctaatgttgatgtatttgtggtcagagaaaattccgacagatcaggtatcacaaattctaatggaggaataacgtattctaataagcaagataacatagataatgtcaaaagtgtgaacatgcaaataactaaaaaaactagtagtaatactgaaactgtaacttcatcttattacagtatagataaagagaatatctcattaaaagaacttgattttaaattaagaaagcacttaatcgacaataacggtctgtataatacagaacctaaagacagtaaaattaaagttactatgaaagatggtggattctacacgtttgaattaaataaaaagttacaaactcaccgtatgggtgatgtgattgatggtagaaatatagagaaaattgaagtgaatttataatattattcgagggagtatatcatgagagaaaattttaagttacgtaaaatgaaagtcggtttagtatctgttgcaattactatgttgtatataatgacaaacggacaagcagaagcatctgaaggtagccaaactgttaagaatccaaaggtaaatgcaactgaagaaatcaaagccgaatcgcaaccagttcaaaacaatcaagaagtaagttcggaccaaacaaaaaagaattttgttaatttagatcctatcaaaccaggagctcaaaaagtaacaggtactacattaccgaatcaattaatcttgttaagtattgataaaaaagacgtgagttcagttgatagtgaaggaagcgaatttataacatctaaagatgatggaacgtttgaatatcctctaaaaaacagaaaaattgtacataatcaagagattgaagtgacatcatcatcaatggaaggattagaggaagaagacgaagagacagaagtagaagaacaagaaagcaatgatgctactcaaaaagttacaacaccacgatatgaaaaagcgtatgaaataccgaaagaacaactaaaagaaaaagatggacatcaccaagttttcattgaacctattactgaaggttcaggtattattaaaggtcatacttctgtaaaaggtaaagttgctctatctattaataataaatttattaattttgaagaaagagctaaagatggaattagtaaagaagatactaaggctagttccgatggggtttggatgcctattaatgaaaaaggatattttgattttgatttcaaaaaaaatccttttgataatttagagttaaagaaaaatgatgaaatctcattaacatttgcacctgatgatgaagatgaagcattgaagtcattaattttcaaaactaaggtaacgagtttagaagatattgataaagcagaaactaaatatgaccatactaaagtggaaaaagtaaaagtattgaaagatgttaaagaagatttacatgtagatgaaatttacggaagcttatatcatacagaaaaaggtaaaggtattcttgataaagaaggtactaaagtaattaaaggtaagactaaattcgcaaatgcagtagtaaaagtatattcagagttaggtgaagcacaactgtttcctgatattcaagtagatgaaaatggtaaatttagctttgatgctgaaaaagctggtttcagattgcaaaatggagaaacattgaattttgcagtagttaaacctattactggagacctattacatcaaggattcgtttctaaatatatcgatgtttatgaatctccggaagaaaagaaagaacgtgaatttgaagaaaaacttgaaaacacacctgcatatcataaattacatggtgataaaattgtcggctatgatgttcaaggtaatccatcaacttggttctatccattaggtgaaaagaaagttgaacgtacaacaccaaaattagaaaaataattaataaaataaaacagcttaatgatgtaatgaaattagtgagttaatcactgacttcaacgtcattgagctgttttttgtgctttgttacaaagcgttattgaatttattttacgtgttcatattttgaaacatcaaagccgtcttgcttagctttgttgataatgtgtttgattgaatgtagtcctttatcggcgaagtatgatcttaagttgtcttttgtagcttggtcagcattcttatctaataacacatcgatataacttaattcatgttctaagaagtttgcatcatcatgtagtacgagtccattttgagaataaactttcgcatctgcttgattactatatccaacaacgccagttgctaaaacacctaccattgccgtagctactaaaacctttttaactttcatatctatcactcctctaaaaaatgtaactccatcataacactgaatattaagaaaattacgtttattaagtcgatttaataatttttaataaatagttaaagtgacaaatattgtttaaatgcaattaatctttaatacgatgcttatggattttccctactaaaaccttgatttcaaaaagggtttaaatcaaatgaaacaataataaaaaataatgcaacataataataagtacaaatttaattaagaaattaaattgattgtatatgtatattttggtaacgtaaaagagaaatatacaaaataagtaattatttatatgaaaagagaatataaatgaagtataaaatagagagacgtgaagcgatgggatatttaaaaaaggttgcattgtacgtaagtatcttaattttaatagttattgtagcaggttgtggcaaaagtgataaaacaaaagaagattcaaaagaaacacaaatcaaaaatagttttgcgaaaacgttagacatgtaccctattaagaacctagaggatttatacgacaaagaaggatatcgagatggcgaatttaaaaagggagataaaggtacatggactttactcacaagttttgctaaaagtaacaaaccaggtgagatagatgatgaaggcatggttttatttttaaatagaaatataaagaaggcaacaggatattattacacgagcaaagttcatgatgaatttaatgaaaaagagcatcaaaaaaaatatcatgttgaacttaaaaataataaaatagttcttttggataatgtagaagacgaaaaacttaaacaaaaaattgaaaattttaaatttcttagtcagtatgcggattttaaagatttaaaaaattatcaagtcgaaagtataacaactaatgaaaatgtaccgagctatgaagcagaatttaaattgaataatagtaatgaaaatgtaaaaaaacttagagaagtttatccaattacaacaaaaaaatctccagtattgaaattacatatagatggtgacataaaaggtagttcaattggatacaaaaatatagaatttaatttttcaaaagtaaaagacgaagaaacagctgttagagattttgtgaattttgggccgtctgatgaagatagctaaagtttattagatgtagaaataattctaaaacagagagatgtgaaatgatgggatatttaaaaagaattggattgtgcataagtctattgattttaatcatttttgtaacatcttgtggtggtaataagatcactggagactcaaaagaacaacaaatcaaaaagagctttgcgaaaacgttagacatgtatcctactgaaaatctagaaaacttttatgataaagaaggatatcgagatggagaatttaaaaaagatgataaaggtacttggctaattagatctgaaatgaaaatccaattaaaagaagaaaatctggaatcgaggggagcagttttagaaattaacagaaatactagaacggctaaagggcattatattgttagagaagttgttgaagatagcgatggaatgacacacaatcatacaaaaaggtatcctgtgaaaatggaaaataataaaatgattccattaaaaccaatcgatgacgaaaaagtaaaaaaagaaattgaagaatttaaattctttgtacaatacgggaatttcaaagaattggaaaactataaagaggacgaagtgtcatataacccagaagtaccaatttactctgcacaatatcaattgaaaaacagtgattataatgtagaacaattaaggaagcgatataatatcccgacgaaaaaggcgcctaaattattattgaagggttcaggtaatttaaaaggctcatcagttggatataaaaatattgaatttacctttgttgaaaataagaaagaaaacatttacttcacagatagtgtctactttaatccaagcgaggataaataaatataattactaatataaaaaataacgttagaacatttaataataaagttaaatgaattacatgtattaaattgaataagttagttttgtttgataacataaaagtgtaataatcactattttattaagttgtatgaaatattcaaatgtgtataaaaataaagcagagagatgtgaaatgatggagtatataaaaaaaattgctatgtacatgagtgtattacttttaatcatttttattgggggatgtggaaatatgaaagatgaacagaaaaaagaggaacaaacaaataaaacagattcaaaagaagaacaaatcaaaaagagttttgcgaaaacgttagatatgtatccaattaagaatctcgaggaactatatgacaaagaaggctatcgagatggcgaatttgaaaaaggtgacaaagggatgtggacgatatatacagatttcgccaaaagtaataaaccgggtgaattgaatgatgaaggtatggttttaaatctggataggaatactagaaccgctaaaggccattattttgttactacattttaccggaatggtaaactaccagatgaaaagaattataaaattgaaatgaaaaataataagattattttattagatgaagtaaaagacgataagctcaagcagaaaatagaaaactttaaatttttcggtcaatatgcaaatcttaaagaattgaaaaaatataataatggcgatgtttcaattaatgaaaatgttcctagttatgatgttgaatacaaaatgagcaataaagatgaaatagttaaggaattaagaagtcgttataatatttcgactgaaaaatcacctatattaaaaatgcatattgatgggaacctgaaaggtagttctgtaggttatagaaagttagaaattgacttttcaaaacgtgaaaacagcaaattatcagtcattgaatttttaagttataaaccagcaaaggtgaataatgatgaaagataaatataaaataaaaacagggaatataaatgttgtaactgaagaaactacagctgtttcaaaaattagttatgaacttgagaatgcacatctacataatcttgataatgatagcattggaaggcaaataaaaggtttaaagtcagatggtaaattcccttctaatcttgaatgtgttgatagttacactgattctcttaatggagtaacaacttctgcttttttaaataaagatacaggcaaagtaactcttgggatgactgggactaatatacaaggctaagcctttaaaaagttaaaagaaggtgaattttcaagacaaaatgttaccaatgctttggaaacagttaaagatggatatgcagatattaaaatattatattctcctgcatctgatcaaaactatagatatgcgaatacacaagaatttataaataaaataaaaagtaagtatgacattgattttattactggacattcactaggtggaagagatgcggtagttctaggaatgagtaatggtattccgaacattgtggtttataatccagctcctatttctataactagtttgaatcctaattccccagatggaaaacgtttattagaattatataagaattataaaggtaatattactagatttgttgcagaaaatgatgaattgacagaaaatctgaagaaatataagcattatgtttttttcggtaatgatatcgtctttaaaaatggtaaaggtcatgaaatggaagggtttttaaccaaagaagaacaaaaagctataaaaaaagaacttaaaaaactaaaaggttatgcagaagaaaataataagtcatttgtaaagcattcaaataatgctatctctaaattagctagtatagaattacttagagccaatatgatgactgcaaatggaggaggattatcttcttcgcagcagaaagttttagaaagtttaacagctttaacaattgcgcagtcattcagtcaactgatagacgatgaaattaatcaaatcaaaaaaatgtataatgaaaagaaaaagaaatttgaaaaaaattgggaagacgctcaaaaagctggaaaagctgtaggtgaagatttgagtgtaaatgaagttctcaatgctttagatgaaggtcaagtgaatgaaagtagtatggtaagagaacctgaacaaatgatatctgcaaaagaaagacaactttcaacgatagggtcttctgtatcaaattatattatgagagttagactcagtattaatgaaatcgttgataaagatcaagtgcttgcatcacaaataggtggattactatgatgtttaatcaaattaataataaaaatgaattagaagaatcatatgaatctgagaaaaaacgtatagagaatgaactgcaaaatttaaatgaacttaggcatagaactcgaaaagaaaatgaacgtagttatgatgtttttcaatatttgaaacacgaaatgaattatagtgaagatgcacaaaggaaaatgacgagaaatatagaagcgtatgagcaagaaatcaatgagataattagaaagcaagaatggaaattagaagaatataaagaagacttaaaaaagtcttatgaaaagcagttagataaactaagtgactgataatttggaggagattaaatgactctaatagaaccagatatgaccttaagaatgccagatataagtactacagtagaaacacttaatctcatatctaaaatgaatgctcaaaaagaaaatattcgcacagttattgcacctgaacataagcataaatacaaagatattgaaaatggattaaaaggtgaagaaaaagtattaattgaacaaatggcgcaacattgcgaagcttttaaagctaattttaaaggcgcagctcaaggagattgggttaaaagtgccatgtctgagatagacagcattaaggatgacctgaaaaaaattaatagctaagctacatatcgaattaataaataaagcgaccaatgttcagtatatgaaatgctcccttcaaagtagacattgaaaaaatgaaaactttgaagggagctttatttatgtcaataaaacctaaagtagacatagatgtactgctatatatgtttcaagaatatgaaaaaggcgtgtcgtttcaatacttaatcgatacattacaattagatattaatgtcaatactttgtatcctaagtataaatattataaaacccatggtattgaaacactacttacacaaaaacaatacaatcactattcaaaggaactaaaattaaaagttgtaaatgaatatttgaattcaaatcaatcaacccaagatctcgcaatcaaatacaatattcgtagttcgacacaagtcaaaaattggataaaaatgtatactgtaggaaaagagattaagagtcaatctccgaaaactggggtgtatatcatgaaagcaagaaaaaccacatttgaagaacgtgtcacaattgttgaatattacttgaatcataaacaatcttatagagaagttgcagaacactttaatatctcatacggtcaaatttaccagtgggttcaaaagtatcaagcacatggtaaaaatggattagtagatggcagaggcaaaggaaaaccgaaatctattatgacgccagaagaacaaaaggaagctgaaattcaagcattaaaagcacaaaatcgattattagagatggaaaatgacgttttaaaaaagtttcaagcattggaaagagagatgattcaaagagaaaacaaatcacggcatacaaaacgattgaagcgttaaaacatcaataccctatccaacgcttgtgtcgtattttaggcatttctagagcgagttattataagtgggtacattatcaatcgagtgaacttgaattagagaatgaacaacttaagcgagaaatagaatcaatctatcataagtataacggtatttatggctatcgtcgcatttatatctatattcgattaaaactaggtaaacaagtaaaccgaaagcgaatttatcgtttgatgaaagaacttaatttaaaagcggtaatacgtcaaaagcgaaaaccttatcgccgttcaacgccacaaatcacatcagaaaataagcttaatcgacaatttgacattgatacgccaaataaagtttggttaacagatgtaacagaatttaaaatcaaagaaggtagtaagatatatttgagtgccatttatgacttaggtgttaaacgtattgttagttatgagctaggcccttctaacaataatcaattagtatttaaaacattcaatcaagcgatagaaaaagtagaaaataccaaaggtattttatttcatagtgaccgaggttttcaatatacatcgaaaacatttaaacatatgttggatgaatgtgacatgattcaaagtatgtcacgtgttagcaaatgtatcgataacggtccaatggaaggtgtatggggtacaataaaaagtgaaatttttagaggaaataagcactttaaatttaatagtgtagaagaagctacaaaaacaattcatgattttattcttttctttaatcatgaaagaattacattaaaaatggctgattctgtataacaacaaaaccaaccattaattttaattatttaattgtctactagactgggtgcagttcaatattcacaactgacactaggccgcttctttttaatttaatttattcccatgtaaagtaattcgaaccgaatcgaaatatcacactcacaattgtaaaaacacaacttaaattactgtcccgcattaaacatgaccacattcgtaacagcaacaataaaaatcctcaagtaccaaaagctatgaccactttatcaaaatcaacgcaagttaacctctcccgaactacctgctataaatcatcatcaccctacaaaccataaagcgctgcagttaagtattgaatggcatagccaattgaaatgaaaatagcaatcgttataatggcactgccgattgtatataaagtatgtttcgtagataatccttcagtctttgaaccaaaaacactgagtagaataaatgcaataccaatgatatataaaactaaaatgacaaatagcatgtttatacacctcgattctctttcgtgagatatatctttgtctccattataaagtaaagcgctcaataatttaattaagtatactatttttttattatcgaagattgcgaaagatgaaacgctcctatataatgtaaaacggaattattcctatttgcaaataaattgaagtgagggtatatatatggctaaaattccagttacggtattaagtggttatttaggctcggggaaaacaacattgttaaatcatattttacaaaatcgtgaaggtcgacgtatcgcggtaattgtaaatgatatgagtgaagttaatatcgataaagatcttgtcgcagatggtgggggactatcgcgcacagacgaaaaattagtcgaactttctaatggttgtatctgttgtacacttagagacgatttattaaaagaagttgagcgtttagtgaaaaaaggtggcatcgatcaaattgttattgagtcaacagggatttcagagccagtacctgttgcacaaactttctcatatattgatgatgaacttggcattgatcttacagcgatttgccgtttagatacaatggttacagttgtggatgctaaccgcttcgtacatgacatcaactcagaagatttattgatggatcgtgatcaaagcgttgatgaaacagatgaacgttcgattgctgatttattaattgaccaagttgaattttgtgatgtattgattattaataaaattgatctaatcagtgaagaagaacttgcgaaattagaaaaagtgttaagtgcattgcaaccgactgctaaaattattaagacaacaaattctgaagtagatttaaaagaagtcttaaatacgcagcgttttgattttgaaaaagcgagcgagtcagcaggatggatcaaagaacttgagtctggtggtcatgcatcgcatacgcctgaaacagaagaatatggcatatcatcatttgtatataaacgtcgtctacctttccatgctaaaaggttcaatgattggttagaaagcatgccaaataatgtcgttcgatcaaaaggtatcgtatggctagcacaatacaatcacgtagcatgtttattatctcaagcagggtcatcttgcaatattcatccagttacatattgggtggttagtatgtctgaagcgcaacaaacgcaaatattagcagaacgtcaagatgtcgcagctgaatgggatccagaatatggcgatcgtcatacacaatttgtcattattggtacagacttagatgaaggtgcaattacaaaagaacttgatgcatgtttagtcaacgcacaagaaattgatgctgactggcaacaatttgaagatccatatcaatggcaaattagacctgcacgctaagttgaatgaagtataatcatttttaaattgtggcttaattgtttgcaatttatgacaattaataaaaagttaagatgttcttaggatctttttgttttcaatctatctaaagtgtgatagttttgataaagcagaaatttgcattttatccatagggctaggacatgtatgtgtcttagtcctttttatatttgcgttgatgaaaaatgacaaaaccatcgtaccaactgttaattgaaagtacaatcattgtttaacggtcataaaaatgagtgaagtaattgcagctatcaatgtactattactgcttacagtcacacgagcgtttcagactaaacgtgcaacgaaattctgcacgcggccaatatatattgcgctagatcaagaagatcattaagatttcgcacgccaaatcatgaatgtctcagacctcgagtatcaaacataaaacacgccacaaaaatataccgcgtcagactacaaagatcacgaatattccgtacgtcccactaagaacatcctatacaaaaaacaccaagaccatttatttgcaacaaactacccagactcacctcacatcaataaatcaacacaaagcaaagccaccatccctattggtatagtggcctgagaattttaagtattcaattcgcttaaattattttgcgaaaatgtcgataattgctttgatgattttaatgatagtacctacaatagccatcgttttgtcctcctgtatgttgatttaacatagtgatgagttgttgatcgttaatgtttgagattagttgttacctaaaaatttaccaagtaaatctttaaagaatttgaataattttgctacgaattccatgtgaatggcccccttcaaataagatgttcatatctatgatatttttataacttacttaccagtgaatttctcaattaatcctttaatgaatttaatgattcctgcaatgatacccatgtgaaagacctcctttgtttgttatgaaaacttatttaccagtgaattgttcgattaagcttttgataactttaatgatgccagcgatgatacccattaagattacctcctttgcttatgagttaacttcattgtacatagttatcttgtgcgtaattgatttttttcctaacttgaattgttatgatcataactgcgaattttttattttaaatggacgggaaatactgcctaactgtacagttgcatttacaaaaactttacaatcattggtttaatagaggttaaggtcatgaatttgacatgaagcagaaatttaattatattttatgttataagtttaaaacgaataacacgttaggtctcgtctaggcaaagcatatttatgaagatgaattgaacagacagaaataacattatatatacatatgtgcatgggagcacgcttaaagagaacagtgtaacaaggtatatcaacataccatggtacagtgtctagttaaactgaaacctgcaatagtaaattttctgccattatgtacagaatctactattgtaggtttttatttttatacataagcattatgcgagagattagaaataaggaggttatgcagtgttaagttttcaattgctattttcactgtttgttattgcgcttatcattgcattgataagtggcttgttgtttttagcaccagttatgccaatgagatatattaaattacatttatacatactagtcatgccagtattatttgcagtcattggctttttcggtattcacggtcaacatgtcttaggcccatttaaaatagatcgtttatcttggttattagctggctttgtaatggcgcttggctttattattcaaaagttttcaatgcgatatttactaggtgatcatcattatagacattactttccattgttcactgcgattacgtcgtttgcatctttagcatggatgtctgaagacttaagactgatggcactctgctggggtatgacattattatgtttaacattgctgatgaacgttaatcgtttttggaaagtgccacgtgagtctgcgaaattatcaagcatgacatttttatgtggttggcttgcattcgttggagcaattgtaactatttatattgcgactggcgagtggcgggtaccacaacatatagcgcatccgacatggtcattgttgacgaatgtactacttgtattagctgtcatgataccagcagcacaatttccttttcatcgatggttgattgaatctgtaacagcaccaacgccagtatcggcaattatgcatgcaggaattgtgaatgcaggtggtgttattctaactcgttttgcgccgatatttgataatggatttgcgttatcattattacttatcctttcaagcatttctgtattgttaggatcaggcattagcttggttcaagttgactataaacgccaattagtgggctctacgatgagtcaaatgggctttatgttagttcaatgcgcattgggtgtatattcagcagcgattattcatttaatattgcacggtatttttaaagcaacattatttttacaatcaggttctatcgtgaagcgattcaatattccaaaacaagcatctgctaaagacgcttatggctggattgtcatgggacgtgtattagctattatcgtggcatttctattttggatgagtagtgatagaagtgcatatgaagtgttaagtgcactcattctagcatggtcattacttgtatcttggaatcaaatggtagcctttagtaaaggacgtatggcacgtctggttggcatgattttgatttcaattgtgacatttatctacatcatcacacataattatttttacgatgtattacaaaatataacaacacatgcgacaacaccgcctacaattagtgtcatcattagtgttgtcatattaatatttggtagtttattgagtatctgggtagcgcgtcatcgatactctaagacttttgcggtattgtacgtgtggttagttaatctaggtgaagcacgctcgaaagcgatagaaagtcatccgaattatttgaagaagtatttataggaggtgaaaggtatgacaacacagttaaatatcaattcagtcattgaaaatgcgaaacgtgttattacaccattatcaccgatttcgatttttgcagcacgaaatccatgggaaggattagaagcggatacgtttgaagatgtcgcaaaatggttacgtgacgttcgcgatgtggatatttttccgaataaagcattaatagaaagtgctgtggcacgtggtgaattagatgaaagtgtctttaatcaacttgttactgatatgttacttgaacatcactacaatatcccgcaacactacatcaatctttatattgataacattaaaacattaaaagacgtacctgcatcatatatgaatcattcaaatgttgatgttgttgctgatctactattagaaaaatcaaaacgtgatatggctgaatcatattatcactatgatgtacgtccgatgagtgatgcattagtagatgaacaaggtgagccacttagcgaacaagtgaatcgtcaaatgattaaatggacgaaactttatatcgatcaatttctatcgagttggacaatgccgaagcgtgagcaaagtttttaccatgcatggttgcatttagcgcaacatgatcatagttttactaaagcacagcgccaagtgattaaaggcttacccaatgatcctaaaatgacgatagagtcagtattaaatcatttttcaatagcgcaggaagactaccaagcttatgttgaaggacatcttttggcgttaccgggttgggcaggtatgttgtattaccgttcacaacagcatcactttgaacaacatttgttaacggattatttggccattcggttagttgtcgaacaattgctagttggtgatgagtttaagtcagtcactaaagattgtgaaagcagatcggaaaattggtttaagcaaactgttgcatcatggtgttactacagtgatatgcctagcgatgtattactacaacatgacgtcaatgaaattcaaacgtttattcattttgcagcaactatgaataaaaatgtatttaaaaatttatggttgattgcctgggaaatgacatacgaatctcagttaaaacaaaaaattaaagcaggtcatgaaagtgtggcgggcgcattagatgtaaaccaagtaaatgttactgaaaatgacaacgctaatcagtcacattcagtatcgttaaatgccacacaagcagttgatgaaaataatagcgagctaaatcaggtgggcacatcaacgaaagcgcaaattgcattttgtatagatgttcgttcagaaccatttcgtagacatatcgaagcagcggggccctttgaaacgattggtattgcaggtttttttggattacctattcaaaaagatgccgtagacgaacaattcaaacatgattcattacctgtcatggtaccgccggcatatcgcattaaagagtttgcagaccgttacgatatgaatgtttatcgacaacagcaacagacaatgtcatcgatgttttacacatttaaattgatgaaaaataatgtcatgcctagtctgttattgcctgaattaagtgggccatttttaagcttgagtaccattgtcaatacgattatgcctagaaaaagtcgcgcgtctttacagaaaataaaacaaaaatggttgaagaagcctgaaacaaagttaacgattgatcgtgagtttgacagaacatcagacttacctgttggatttactgagcaagagcaaattgatttcgcgttacaagcgttgaaattgatggatttaaccgaagcatttgcgccgttcgttgtgttagcaggtcatgctagtcattcccacaataatccacatcatgcatcacttgaatgtggggcttgtggtggtgcatcaagcggttttaatgctaagttattagcgatgatttgtaatcgtccaaatgtcagacaaggattaaaacaagcaggtgtagtaattccggagaccacggtctttgcggcagcagaacatcatacgtctactgatacgttggcatgggtatatgtgccagatacattatcttctattgctttagatgcatatgaatcattgaatgacgccatgccgatgatttctgaacactcgaatcgcgaacgtttgaacaaactgccaacgattggtcgtgtgaatcatccagtggaagaagcgcagcggtttgcaagtgattggagtgaagtgcgtccagaatggggtctggctaaaaatgcatcatttataattggacgacgccaattaacaaaaggcattgatttagaagggcggacatttttacacaattatgattggcgtaaagataaagatggcacattgttaaataccatcatttctggtccggcacttgtggcacaatggattaatttacaatattatgcgtcgacagttgcgccgcatttttacggaagtgggaataaagcgacacaaaccgtcacgtcaggtgttggtgtcatgcaaggtaatgcgagtgatttgatgtatggcttatcatggcaatctgttatggctgctgatcgaacgatgtatcattcgccaattcgtttgcttgtcgttgttcaggcacccgactatgttgtagctagactactcgcgaataatgagcatttcgctaggaaggtgtctaatcattggctgcgtttaatgagcgttaatgaggaagggcgttttaaaagttggatttaacgatgaaatgttgcgatgctaagtaactaatatatcatcatatctacaatgttctagcttcttaaaatatactaaaaatgataaacttaatgtaatagttgatgtcgtgataacgatacaaagatgaagtaatcaattttaatattattggagttagtgatatgaaaagaacgaaaggtgaaatcgaagctgaaatcagtaaagccattacgcaatgggaaaaagatttccttggcagaggttccttgtcggttaaatcagacattttaagagatatggtgattattagtttgcaaggtatcttaacgccagcagaatatcgtgtgtgtagtacgaatgaaggattattaaatattaaacgaacacgttctgaattagttgaatccggtgagcaagatttgaatgatatcatttttaaaattacaggtatcaaagtgatgagcttccatagtgatttaagtacagttacaggtgaacgtattatcgtattcaaacttgaggataatttggaaaagcatatttaagaaggttatgtatgcttctgctggcttattaaagctatagaagtatgcttggttaaacagcgcaacgccatatatttgggtgtgctgtttttctattatatgatgtgtttatcatgtggaagaatgtgtggctatgaatatagcccgtgaaaggcgtatgtcataaaatttgcgaatgctgacaagtcaacgcaagcatatttgttgcgagactgcccactatccttttacataaagagtatatgtgtgacgtaggcatataatcgataaagtatacctaaaaaattaggtataatgaccattgttgcaataagtttttcggccttaaaaccgataacgcatagtataataggaataaaatataatacaaatatccagtaaatcaaatttgaaaacgatggatgtataggggtaaagaatctaactaatgtaatgattaacgctatatagacaaaaattattctattgatacgccctaccccctctgtataataaatatagatcgtactaaattggaaatagcaaaatattgttatttcaattatacaatgttttatttgcaatatacataacaatatgaactttataattttgatattgtcggtaaagtgaaatttgtggcacattgatattatggataacatttgtaaaatgaaaatgatgatacgaggagattgtaagatgatagataaaaaattaacatcacctaaaatgacagtgcctttatttttaattgcgctgattgtatttataggtatgttttacagtgtagtgacaaaccaagaatggcttaaaaatatagatatgggatcattaacatggtttacagattatttcggtgagccacaacgtcagtatattaacaatttgtttaattactatatgacgtttagtgcggaaattggagatgtcaaaggtgtcgtgttgatttccattatcgtcacaatcatactgtttattaaacagaggcatttagcggtttggtttgtgacatatttggtttcaggtgtcatcatgaacaaattaattaaagatactgttttacgtccaagaccatataatcatttagccgttgatacaggcttttcatttccgagtggacattccaacgccagcacattattatatttcgccttaatgatcattattatttcagttgctgctaagacaataacaaaagtgttgagtgcgctggttatgggaatattatggcttagcatattattttgtcgcctttattttcatgcgcattacttttcagatgtcattggcggcacgtcactagcaatcatttgggtagcgttattcctaatggtatacccatactttattaatcatcgacgacaacgcgtttagcaaacatctttagacatagtggaggtatatagaaaaatgagaattaaaacaccgagtccatcttatttaaaaggcacaaatggacatgcgatattattattacattcatttacaggtacaaatcgggatgtgaagcatcttgtagctgagttaaatgaccaaggatttagttgttatgcaccgaattatccaggtcatggtttattgttgaaagatttcatgacatataatgtagatgattggtgggaagaagttgagaaagcttaccaatttttagtcaatgaaggttatgaatctatcagtgcaacgggtgtgtctttaggtggattaatgacattaaaattggcgcagcactacccgttgaaacgtatcgctgtcatgtcagcaccaaaggaaaagagtgatgatggcttaatagaacatttagtttattatagtcaacgcatgtcgaatattttaaatttagatcagcaagcatcgagtgcgcaattagcagcaattgatgattatgaaggtgaaattacgaagtttcaacattttattgatgatatcatgacaaatttaaatgttattaaaattccagctaatatattatttggtggtaaagatgcaccatcctatgaaacaagtgcacactttatttatgaacatttaggatcagtagacaaagaattaaatggtctgaaggattcacatcatttaatgacgcatggagaaggcagagatattttagaagaaaatgttattcgctttttcaatgctttaacgtaattgaagattttaaaaattaacacttgagtgacgatgttattatatttgtcatttgagtgtttttttgtggcgtgatagtatagggaacttagacaaagttaatttttagtgtgatgtcgtggaaatattatggagttataccagaagttgatttgtattgtaatgtcgtgggaattttgttggcattgtacctgaagttgttatgtggcgagatgttggggatatagatggtgttgtatgtggcgagatgttggtgcacgtatacagcgttgaaccagaaattttaatgtagcgtaatgacaacacattacaagggatttactatattatgataaacccaggcgctaccgtattaatgaaacaattttgatgcaggtgtattgcatgttatttacatacatgttagagtgttacttaaacacgtagacgctttaacgctttaaaggaggtgtggatgatgaaaagacaacaatcacaatggaagtcatcaactggatttattttagctagtgcgggttctgcaatcggtcttggtgccatgtggaaattcccatatatggcagggatctatggcggcggtgcctttctagctatgttcttaatattcaccatttttgttggattaccgttactcattatggaattcactgttgggaaaatgggacggacatatacaacacaaatatatagtaaattaactggtaaaaaatggctcaatatcattggctggaacggtaatttggcagtgtttattttatttggcttctatagtgttatcggtggttggattgtcatttacatcggacaagtattatggcaattagttatatttcaacgcatcaatcatctccaagaaatgaattttgaagcggtaatatcaaatccttggttaaccgttctagggcaaggtatattcatattcgctacgatgattattgtcatgttaggtgttgaaaaaggattagaaaaggcatcgaaagttatgatgccgttgctgtttgtctttttaatcatcattgtgattaagtctttaacattagatggtgccttagaaggtgtgaaatttattttacaaccaagagtatcagagattactgctgatggaatcttgtttgcgctaggtcaatcattctttacgttatcattaggaactacaggtatgattacttatgcgagttatgcctctaaagacatgacgattaagtcatcagctatttctatcgttgttatgaatatctttgtatctgtattggcaggcctagctatatttccggcgttacatagttttggctatgaaccacaagaagggcctggattattatttaaagtactgccaatggtctttagtcaaatgcatctaggcacattattctatttgggattcttaatgctgttcttatttgcggctttaacgtcatctatttctttattagaattaaatgtttctaacttcacgaagaatgacaatacaaaacgtaaaaaagtcgcagtgatcggtagtattttagtatttattattagtattccagcaaccttatcttttggtatcttaaaagatgtaagattcggtgcgggaacgatttttgataatatggatttcatcgtttcgaatgtattgatgccattaggcgcattaggtactacgcttgtcgtaggacaattattagataaaaaattattacaacaatattttggtaaagatcgatttagattattcagtggttggtattacttaattaagtatgcgatgcctgtcgttattattttagtctttatcgtgcaattatttagttaatatatagaagcatctgacgcacaagtatttgtgttgctcaggtgttttttgtttggaattgaaaagttagtactgcttctgaattaatcgaaacttagataattgcaaaataacaaaatgtcgtttataattcttatctgaaaagtaagaattaaaattgagacatgaagaaaggtttcattcatttgatcggcatgtcagatgagggtgcatctatgattacttatgatttaattggcaatacaccattagtactgttagaacattatagtgatgataaagttaaaatttatgccaaacttgaacaatggaatcccggaggcagtgttaaagacagacttgggaaatatttagtagagatggcaattcaagaagggcgtgtgcgtgcaggtcaaactattgttgaagcgactgctggcaatacaggcatagggttagctattgcagcaaatagacatcatttgaaatgtaagatctttgcgccgtatggtttttcagaagaaaagattaatattatgatagcgcttggtgcagatgtttcaaggacgagtcagtctgaaggcatacttggagcacaaaaagctgcacgtgcttatgctgagaaatataacgctgtttatatgaatcaatttgaatcgtttcataatccagatacgtactttcatacgttaggacctgaactgatatcagaattacagcaaattgattattttgtggctggtattggctctggcggtacatttacaggtatcgcacgttatttaaagcaacatcacgtgcaatgttatgccgttgagccagaagggtccgtgttaaatggagggccagctcatgcacatgacactgaaggtatcggttctgagaaatggccgatatttttagagagaagtcttgtagatgggatatttacgattaaagaccaagatgcctttcgaaatgtcaaaagtttggcaaagcatgaaggattactggtagggagttcttcaggtgcagcattacaaggtgcattgaatttaaaagcgcaattatctgaaggtacgattgttgtcgtatttccagatggtagcgatcgatatatgtctaaggaaatatttaattatgaggagaatgattatgaataagaaaacgaaattaattcacggtggacacacaacggacgactatacaggtgcagttacaacaccaatttatcaaacaagtacatatttacaagatgacattggtgatttacgtcaaggatatgagtattctcgtactgcgaatccaacaagaagttctgtagaaagcgttattgcggcattagaaaatggcaaacatggctttgcatttagttcaggtgttgcagcaatcagtgcagttgttatgctgttggacaaaggtgatcatattattttaaattcagatgtatacggcggtacttatcgcgcattgacaaaagtatttacacgatttggcattgaagtggattttgtagatacaacgcatacagattcaattgtacaagcgatacgcccaacaacaaagatgttgtttattgaaacaccttctaatccattattacgtgttactgacattaaaaagtctgctgaaattgcgaaagaacacggtttgatttcagtcgttgataacacatttatgacaccttattatcagaatccattagatttaggcatcgatattgtcttacattctgcaacgaaatatttaggtggacatagtgatgtcgttgctggtttagttgcaacatcggatgacaagcttgcagaacgtttagcatttatttcaaattcaacaggtggcattttaggacctcaagatagctatttacttgtgaggggtattaaaacattaggtttacgtatggaacaaattaatcgcagtgttattgaaattattaaaatgttacaagcacatccagctgtgcaacaagtgttccatccaagtattgaaagtcatttaaatcatgatgtccatatggctcaagcggatggccatacaggtgtgattgcatttgaagtaaaagatacagaaagtgccaaacaattgattaaagcaacatcgtattacacattagctgaaagtttaggtgcagtagaaagtttaatttcagtacctgcactgatgacacatgcatccattccagcagatattcgagctaaagaaggtattacagacggacttgtaagaatttctgtaggtattgaagatactgaagatttagtggatgatttaaaacaagcactagatacgttataaataatagcagcactggcatatattttgagttcaacattttttgttcttgaatatgctagtgcttttttagtgtgatgttaatatttcgtaattgcgttgtggaggattgctggtcatttttattcatttaattcgataaatgtcatagtagtctcacaattcatcattgtcacatgaatcgcttattttttaatttttagaaaattcggcaaattgtattgacgatatatgcaattttacatataatgctcttattcctagtggattaataagaatttgtaggaggggcgatgatgattgagtttcgacaagttagtaaatcgtttcataagaaaaagcaaacaatagatgctttgaaggacgtatcatttacggtcaatcgcaatgatatttttggtgtgattggatatagtggtgcaggaaaaagtacgttggtaagactcgtgaatcatcttgaagctgcctcgaatggacaagtgattgtagatggacatgatattacgaattatagcgataaaatgatgagggatattaagaaagatatcggtatgatatttcagcattttaatttactaaattcagctacggtatttaaaaatgtagctatgccgctcattttaagtaagaaaagcaaaacagaaattaagcaacgagtaacggaaatgcttgaatttgtaggattaagtgataaaaaagaccaatttcctgatgaattatctggtgggcagaagcaaagggtggctattgcaagagcgcttgttactaatccgaaaatactcctatgcgatgaagcaacaagcgcattggatccagcaacgactgcttcgatattgacgttattaaagaatgtcaatcaaacctttggcattacaattatgatgattacacatgaaatgcgcgttattaaagacatttgtaatcgtgttgctgtaatggaaaaggggcaagtggttgaaacaggaactgttaaagaggtgtttagtcatcctaaaacgacgattgctcaaaattttgtgtctacagttatacagactgagccaagtacatcattgattcgtcgattgaatgacgaacaagttggcgattttaaagattataaaatcttcgtcgaggaaactcaggtgacacaaccgattataaatgacttgattcaactttgtggcagagaggttaaaattttattttcatctatgtcagaaatacaaggtaacaccgtatgttatatgtggcttcgatttaatatggataaacaatttgatgacaaggcaataaatcaatatttcaaagagaaaaatattcaatttgaggaggtgcattaacatatgtttggttctgatttagacagtgcacagttattacaagcattatacgaaacactatatatggtatctattgctttatttttaggagcagtgattggtattccattaggtgtcttattggtaattactcgaaaacaaggcatatggcccaatatagtgatacatcaagttttaaatcctttaatcaatattttaaggtcactaccatttattattttgttaattgcgattgtgccattcacaaaattagtagtaggtacttcaattggtacgactgctgccatcgtacctttaactgtatatgtggcaccttacattgcaagacttgttgaaaactcattattggaagtagacgaggggattattgaagcggcgaaagcgatgggcgcttcaccactacaaatcattagatattttttaattcctgaagcgttaggttcattagtattagcaattaccactgcgattattggacttattggaagtacggcgatggcaggagctgttggcggtggtggtataggagacttagctttagtgtatggttatcaaagatttgatacgacggtcattattattaccgttattgtattagtcattattgtccaagtgattcaaacgctagggaatgtcctagctaggttcatacgtagacattaatgatatatagtgaagattttgaaaggaattgatagaatgaaaagattgattgggttagttatcgtagcacttgtattattagcagcgtgtggtagtaacaatgataaaaaagtaacaattggagtcgcatcaaatgacactaaggcttgggagaaggttaaagaattagctaaaaaagatgatattgacgtggagattaagcacttctccgattacaatttaccgaataaagcattaaacgatggtgatattgatatgaatgcattccaacattttgcatttttagatcaatataaaaaggcgcataaaggaacaaagatttcagcattgagtacaacagttttagcaccgttgggtatttactcagataaaattaaagatgtcaaaaaggttaaagatggtgctaaagttgtcattccaaatgatgtatcaaaccaagcacgtgcacttaaactattagaagcagctggtttaataaaactgaaaaaagatttcggattagcaggtacagtgaaagatataacgtcaaatccaaaacatttaaaaattactgcagtagatgcacaacaaactgcacgtgctttatctgatgtcgatattgcagttattaataacggtgtagcaactaaagcgggtaaagatccaaaaaatgatccgattttcttggaaaaatcagattcagatgctgtaaagccatatattaatattgttgcagttaacgacaaagacttggataacaaaacatatgctaaaatcgtagaattgtatcattcaaaagaagctcaaaaagcgttgcaggaagatgtcaaagatggagagaaacctgttaatttatctaaagatgagattaaggcaatagaaacgtcattagcaaaataaattatattgcgtcctacaagcaaagttcatgcttatgtttgtagggcgttattgtttgacaataaaaatgtttcaaaagacagaaagggattgtaaacattttatagtgaaatattatgaaattgtaataatttagatattgtaaaatctaataagttgtaataattttaaggggtaattataaaatttgatgatacagtatatgatttttttgtaatcataatgtcatcaaacatcaacctattatacataataaaatcgtataatgatgtagtattcataaattcggataaaagaatgttaggaaagttaagcaagaggaggattttaaagtgcaaaaaaaagtaattgcagctattattgggacaagcgcgattagcgctgttgcggcaactcaagcaaatgcggctacaactcacacagtaaaaccgggtgaatcagtgtgggcaatttcaaataagtatgggatttcgattgctaaattaaagtcattaaacaatttaacatctaatctaattttcccaaaccaagtactaaaagtatctggctcaagtaattctacgagtaatagtagccgtccatcaacgaactcaggtggcggatcatattacacagtacaagcaggtgactcattgtcattaatcgcatcgaaatatggtacaacttaccaaaatattatgcgtcttaatggtttaaataatttctttatttatccaggtcaaaaattaaaagtatcaggtactgctagctcaagtaacgctgcgagcaatagtagccgtccatcaacgaactcaggcggcggatcgtattacacagtacaagcaggtgactcattgtcattaatcgcatcaaaatatggtacaacttatcaaaaaattatgagcttaaatggcttaaataatttctttatatatccgggtcaaaaattaaaagtaactggtaatgcaacatcttcaaactcaggatctgcaacaactacgaatagaggttacaatacaccagtattcagtcatcaaaacttatatacatggggtcaatgtacatatcatgtatttaatcgtcgtgctgaaattggtaaaggtattagtacttattggtggaatgctaataactgggataacgcagcggcagcagatggttacactatcgacaatagacctactgtaggttctatcgctcaaacagatgtaggttactatggtcatgttatgtttgtagaacgtgtaaataacgatggtagtattttagtttcagaaatgaactattcagctgcaccaggtattttaacttacagaacggtaccagcttaccaagtaaataattatagatatattcactaaagtcttacgtatataaatatatataatgaattcctattacatttcacaagctgaaaagttggattgaatcctaaactttatggcggggctatcaaagtcgtgattgttgtaataggaatttttgtataagaaaaaggattggtcgaatgaacttcatgttctatgttcgaccaatccttttctgatttagtattcatgctttactttgcgaatgcttgtaaataatctagcaccgtttgttattaaagtaacaactgccactgcttttttgaacttgcgtggtgacttaattgaaatgtaaaagtctaacacggttcctacagtgcttaaacctaatgaaagatgtactaattttttatttttagcatgatatttatagccattgtagccgtcgactatgaaacctgcgacatttagtaaacttgataaacgttgtgatttggaacgttttgccataataataattccccctagtatcttctgtttatatggaaaacttgcgtgcgctgaattgctaacgttttgcactataactactcatatatgataacataattgtacagtataatttgaaaaattgatttcacaaagttggggtgtcatagatgattaaatgtgtctgtttagttgaagaaacagctgataaaatattgcttgttcaagtaaggaatcgcgaaaagtattatttcccaggtggtaaaatagaagaaggggaatcacaagtacacgcgctgttaagagaagtaaaagaagaactaaatttaacattaacaatggatgaaattgaatatatcgggacaattgtaggtcctgcatatccacaacaggatatgttaactgagttaaatggatttcgcgcattaaccaaaatcgattgggaaaacgtaactatcaataatgaaattacggatatacgctggattgataaagataatgatgcgttgattgcgcctgctgtcaaagtttggattgaaacgtatggtggtaaacatgacaaataatgacactatcatgttacgacattatgtcccacaagattattcgatgttagaagcttttcaattaagtgaaagtgatttgaagtttgttaaaacgccagaggaaaatattacagctgcaatgtctgataatgaaaggtatcccatcgttgtaatggatggcaggcaatgtgtggccttttttacattacatcgtggaaaaggagtcgcaccatttagcgataaccaagatgcagtattttttaggtcatttagtgttgatcaacgttatcgtaataaaggaataggtaaagtggtaatggaaaaattggcgtcatttatcacttctacatttcaggatattaatgagattgtgttaacggtaaatactgacaatccacatgccatggcactttatcgccaacaaggatatcaatatatgggagatagtatgttcgtcggaagacctgttcatattatggcgctaactataaaataaattaaatttaaaagcatctttactcatcgtcgaccacaacaattaatgatgaataaaggtgctttttgttatagaccaccggacaatttactatagtaaaaagcgacctagtgaacaattgacatatatccacaggtcgcttaacttaagttatattgctagttgcgattaattgatagactcatcatttttgcgctgtcgagatggtctttttattaaaaatgccgtgatccaagccgtaatcggaatactgattgcaacggcaataccgcctaaaataatagaaataaattcttgggcaaatattttcgagtttataatatgaccaaatgaatatttaagtttgaaaaaccaaataaataaagcaagttggccaccaaaaaaggcaaggtaaatcgtgttcgcagatgtcgctaaaatttctctaccaacacgcatgccagattggaataattcgtattgcgtaagtgttggattcacttgatgcaattcataaatgggtgaactaatggtgatcgttaaatctatcacagctgcaataacagcaagaataatagtgaacaccataaattgaaccatatcaatgccaatattcattgaatacacatatgtttcatcttgttgttcggttgaaaagccttggagatgaccgaagtagaccgataaataaatgagtgtaatcaacaatattgttgtaacgatagtgctgataaatgcagcttgtgttttaacattgtaactattgagtacgaataaattacaagcgccaataataatgcagaaaaagaatgtgacgacataaatcggtacgccaaaaataatcaatacaatactaatgattaaaatagcaaaatttaaaaatagggttaaataagagatgaatccctttttacctccgaaaattatcatcagaaagaggagcaataacgccaatataaatacagcattcattgtttcgccctccttaatgtttcaaatatttccataaacaatattgtgataggaattgtaagtacgatacctataccacctgttagtgcgcgcgcaatttctaacgaccaattcatcgaaatagtataagtcactgtattggcattttttaaaaagattaaaaacataggtagtgcaccggataaatatgagaataataagatgttagtcattgttcccataatatcttggcctatgtttcgcccagcaagcgcccatctcctcattgaaatgtgcggcgtacgctgtaaaatttcatgcataccactagcaattgtaattgcaacatccataatagcgccaagtgaacctattaacactgaggctaggaaaatatctttcggtggtaatgataaaaaattcatcgtttcatatttaatgcctttaccatctgtcatatatatgattaattctgttaaacctatactcaaaaaagttccgataattgtacttgctacggtaatgagtgtacgcatatgccagcctgtaacgagcaataaagtgagtattgttgaacagatcatggcaatggtcatgagtaagaataaattaatattgctatgttgaatatgaatgtaaattgcgattaatatggcaatagaattcaagattaacgataaaatcgattgcagtccgactttgcgaccaaccaataatacagttaataaaaacaaaccagtgatgataaccgttaaggtatcacgcttcttttctataatataagcatcactcggcttgttagaaatatgtaataatactttttcgtgtgtgcgaaatgcttctgaatctgcttgagatttgacgtactgatgattaatcgtcgtcgtttctccagcaaattgaccatttaatattttgacttttaattgatttttatacttagtatcgcggttattttgtgcatcttttgtaggtgtcgatgaaacgtgtttgacatctataatttgaccaattggtttgttgtaaaagttctcattattgaatgtaaataaaatagcaccaatgaatgcgatgcagaacaaacctaaaattatattaaatggctttgtaaataaatttctatatttcaaaaacaaaaccccaattctatgaatgaattaatatggtgattatacgcccttaattttttattttcaaagatattactgctaagtgtaaaacgaaaatcatcattgatagcgttgaattacttaatggaatgtagacgttttagtcattaattgctgaatgagtgttaataatatgccaatatcgctcttcgtataaggctcctttgtaatagcacatatcgttctttttaattcagtatggtctaattttatatctatccatgatttagattctggtaaatgtatattttgtgatgaaatgatgtaaccttctttttgacgaaggagatactgcgcaagtggttggctactgattgtgtatacatctgatttagtaatcttacgcaattgcttttttacagattcggcaaatggtgccaagcaataaatatgactatgctcaaactgaattaatggcgggtgtgtcgccatcgtgattggatcgtctgaaggcgcatataaatgatagtgctcttcgaataaaggtagcatatgtaattgtttgtgtttacgtatttctggtgtaagttccgtgaaaccaatgtctatatttccatttaatacgctatttataatcgtgtcatgatctaataagttcggtatgacatgtgtatcattttgtaaatgaaacgtttggataagtggtagtaacatgtgggatacgtcactctcatcatagccaatgtagatacttttatttttagttaatccatggctttgaaattgttcaatcgtgctatctaaatgttcaataatacgcagagcttcattaaataataatttcccttcagatgtgagcgtaatattacgtccttgctttttaaataaagacacattaagttcttgttctaataatgtaatttgacggcttatcgctgattgagcaatgtttagttcaagtgctgtttcggagatatgttctcttttagcgacctcgataaaatatcttaattgtttaatttccatagcgatataggcacctccaaaaatgagtgttttgtaactattatagcaatattattgataaatgttctattttttagatgaatatcttctattttatatattgaacagataaattttttagattatagtaattatcattaataactaatatcagaatattctaaaaaaggggtgtgcatcatgcacaatgagaaattaattaaaggcttatatgactatcgtgaggaacatgatgcgtgtggtattggtttttatgcgaatatggacaataaaaggtctcatgacatcattgataaatcgcttgaaatgttgcgacgcttagatcacaggggcggggtcggcgcagatggcatcactggtgatggcgcaggtattatgactgaaataccttttgcatttttcaaacaacatgtaacggactttgatatcccaggtgaaggtgaatatgccgtggggttatttttttccaaagaacgcgttttaggttctgaacatgaagtagtttttaaaaaatattttgaaggcgaagggttatcaattcttggttatcgtaatgtaccagttaataaagatgccattgctaaacatgtagcagatacgatgccagtcattcaacaagtgtttattgatattagggacattaaagatgttgaaaagcgtttgtttttagcgagaaaacaattagagttctattcgactcagtgcgatttagaattatattttacgagcttatcacgcaaaacaattgtatataaaggttggttacgatcagaccaaattaaaaaactctatacagatttatcggatgatttatatcaatcaaagctagggttagttcattcgagatttagtacgaatacattcccgagttggaaaagggcgcatcctaaccgtatgttaatgcataatggtgagattaacacgattaaaggtaatgtgaactggatgcgagcacgccaacataaattaatcgaaacattatttggcgaggatcaacataaagtgtttcaaattgtcgatgaggatggtagtgactctgccattgtagataatgcgctagagttcttatcgttagccatggagccagaaaaggcagcgatgttactcatacctgaaccttggttatacaatgaagcgaatgatgcaaatgtacgtgcgttttatgaattttatagttatttaatggaaccgtgggatggtcctacaatgatttcgttctgtaacggtgacaaacttggcgcgcttacagatagaaatggattacgtccaggtcgttatacgattactaaagataactttattgtcttttcatctgaagtgggtgttgtggacgtacctgaaagtaatgttgcttttaaaggtcaattgaatcctggaaagttattgcttgttgattttaaacagaataaagtcattgaaaataatgatttaaaaggtgcgattgccggagaattaccatataaagcgtggattgataaccataaagttgattttgattttgaaaatatacaatatcaagattcgcaatggacagatgaaacgttatttaaattacaacgtcaatttgcatacacgaaagaagagattcataagtatattcaggaacttgtagaaggtaagaaggatcctatcggtgcaatgggatatgatgcgccaattgcagtgttgaacgagcgaccagaatcactatttaattactttaaacagttgtttgcacaagttacgaatccaccaattgatgcgtatcgtgaaaaaatcgtaacgagtgaactttcttatttaggtggcgaaggtaacttattagcacctgacgaaacggttttagatcgaattcaattgaagagaccggtattgaatgaatcacacttagcagcgattgatcaggagcattttaaattaacatatttatcaacggtatatgaaggggatttagaagatgcgttagaagcattaggccgagaagcagtggatgctgtaaagcaaggcgctcaaattctagtgttagatgatggtagattagttgatggcaatggctttgcaatgccgatgttactcgcaataagtcatgtgcatcaattacttattaaagcagatttacgtatgtctacaagtttagtcgctaaatctggtgagacacgagaagtgcatcatgttgcttgtttactagcatatggcgcgaatgcaattgtgccatacctagcgcaacgtacagttgaacaactgacattgacagaagggttacaaggcaccgttgtcgataatgttaagacatatacggatgtattgtcggaaggtgtcattaaagtaatggctaagatgggaatttcgacagtgcaaagttatcaaggtgcacaaatatttgaagcgattggcttgtctcatgatgtgattgatcgttattttactggaacacagtctaagttatctggtatttcgattgatcaaattgatgctgaaaataaagcacgtcaacaaagtgatgataattatcttgcatcaggtagtacattccaatggagacaacaaggtcaacatcatgcttttaatccggaatctattttcttattgcagcacgcatgtaaagaaaatgactatgcgcaatttaaagcatactctgaagcggtaaacaaaaatagaacagatcatattagacatttacttgaatttaaagcatgtacaccgattgacatcgaccaagttgaaccggtgagtgacattgtcaaacgctttaatacaggggcgatgagttatggatcgatttcagcggaagcacatgaaacgttagcacaagccatgaaccaattaggtggaaagagtaatagtggtgaaggtggcgaagatgcaaaacgttatgaagtacaagttgatggaagcaacaaagtaagtgcgattaaacaagttgcttctggacgttttggtgtaactagtgattatttacaacatgccaaagaaattcaaattaaagttgcgcaaggtgcaaagcctggtgaaggtggtcaattacctggtactaaggtatatccgtggattgcgaagacaagagggtcaacgccaggtatcggtctgatttcaccaccgccacatcatgatatttattcaatagaagatttagcgcaactgatacatgatttgaaaaatgcgaataaagatgcagatatcgcggtaaaattagtttcgaaaacaggtgttggtaccattgcatctggggtggcaaaagcatttgcagataaaattgtcatcagtggttacgatggtggtacaggggcttcacctaaaacgagtattcagcatgccggtgttccttgggagattggtttagcagaaacacatcaaacattaaaactaaatgacttaagaagtcgtgttaagttagaaacagacggtaagttattaactggtaaagatgtagcgtacgcatgtgcgcttggagcggaagaatttggatttgcaactgcaccattagtggtgttgggctgtattatgatgcgtgtatgccataaagatacatgtccagtaggagttgcaactcaaaacaaagatttacgtgctttatatagaggtaaagcacatcatgttgttaattttatgcattttattgcacaagaattaagagaaattttagcatctttaggtttgaaacgtgtagaagacttagttggaagaactgatttattacaacgatcatcaacattaaaagcgaatagcaaagcggctagtattgatgttgaaaaactgttatgtcctttcgatgggccaaacacaaaagaaattcaacaaaatcataatcttgagcatggatttgatttaacaaatttatatgagataacgaagccatatattgctgaaggacgtcgctatacaggtagctttacagtaaataatgaacaacgtgatgtaggggttattacaggtagtgagatttcgaaacaatatggagaagcaggacttcctgaaaatacaattaatgtttatacgaatggtcatgctggtcaaagtcttgcagcatacgcaccgaaaggcttaatgattcatcatactggagatgcgaatgactatgttggtaaaggattatctggtggtacggtcattgtcaaagcaccttttgaagaacgacaaaatgaaattattgctggtaacgtctcattctatggtgcgacaggtggtaaggcatttattaacggtagtgcaggagaaagattctgtattagaaatagtggtgtagatgctgtcgttgaaggtatcggcgaccatggattagagtacatgactggtggacatgtcattaatttagatgatgtaggtaagaacttcggtcaaggtatgagtggtggtattgcttacgttatcccgtctgatgtagaagcttttgttgaaaataatcaactagatacgctttcgtttacaaaggttaaacaccaagaagaaaaagcattcattaagcaaatgctggaagaacatgtgtcacatacgaatagtacgagagcgattcatgtgttaaaacattttgatcgcattgaagatgtcgtcgttaaagttattcctaaagattatcaattaatgatgcaaaaaattcatttgcacaaatcattacatgacaatgaagatgaagcgatgttagctgcattttacgatgacagtaaaacaatcgacgctaaacataaaccagccgttgtgtattaaggaaagggggagatacgatgggtgaatttaaaggatttatgaagtatgacaaacagtacttaggtgaattatcactggtagaccgtttgaagcatcataaagcatatcaacaacgatttactaaagaagatgcctctatccaaggtgcgcgatgtatggattgtggaacgccgttttgtcaaaccggacaacagtatggtagggaaacaataggttgtccaattggaaactacattcctgaatggaacgacttagtgtatcatcaagattttaaaactgcttatgaacgcttaagcgaaacaaataactttcctgactttacagggcgtgtatgtcctgcaccatgcgaaagtgcttgtgtgatgaagattaatagagaatcgattgcgattaaaggtattgaacgcacaattattgatgaagcttttgaaaatggttgggtagcgccgaaagttccgagtcgccgtagagatgaaaaagtagcaatcgttggaagcggtccagcaggattaactgctgctgaagaacttaatctactaggatatcaagtaactatttatgaacgtgctagagaatcaggcggtttattaatgtatggtattccgaatatgaaacttgataaagatgtggttcgacgtcgtattaagttaatggaagaagcgggcattactttcattaatggtgttgaagtaggcgttgatattgataaagcaacgttagaatctgagtatgatgccattatattatgtactggtgcacaaaaaggtagagatttacctttagaaggacgcatgggtgatggtattcatttcgctatggattatttaactgaacaaacgcagctgttaaatggagaaattgatgatataacaataactgcaaaagataagaatgtcattatcattggtgctggtgatacaggggcagactgtgtagcgacagcattaagagaaaattgtaaatcgattgttcaatttaataaatatacgaaattgccagaagcaattacatttacagaaaatgcatcatggcctttagcaatgccggtgtttaaaatggactatgcgcaccaagagtacgaagctaagtttggtaaggaaccacgtgcatatggtgttcaaacaatgcgttacgatgttgacgataaaggacacatacgtggtttgtatactcaaattttagagcaaggcgaaaatggtatggtcatgaaagaaggacctgaaagattttggcctgctgaccttgtattattatcaatcggcttcgaaggtacagaaccaacagtaccgaatgcttttaacattaaaacggatagaaatcgaatcgtggcggatgatacaaactatcaaactaataatgaaaaggtatttgctgctggagatgctagacgtggtcaaagtttagttgtatgggcaattaaagaaggtagaggcgtagcgaaagcagtagatcagtatttagcgagtaaagtttgtgtataatctttgtatggaaatggtggttacgttgacgttgtgtcatgttgaatcgagtttgaaataatctagtatctatcaacgtcacatgccatctttgtaacctaaaaacaaaggtttgtaagacaacaaatggattaattataagtagtgattttttacattcgttttataggtcaactgtagtggaagacaatgatttgtggtaatcatgtaatgcttaaaaacaatattgacttttacagaacgttcatatatgataaatattgtgtttaggaggaatacccaagtccggctgaagggatcggtcttgaaaaccgacaggggcttaacggctcgcgggggttcgaatccctcttcctccgccatcaatatttatattaaatactatatataaaaaaggtaagtactcaaagtttgagtgtttaccttttttatatgcctttgaatgactcgtaatttttgataatagaaatgataaggcattgagattggaagggcatttggcttgtgcaatatacatagctaaatgtcttttttgttttgtgaaatatgatggatggtttgtgtggcaagtttgctatttgtagatatgcatttttcaatttaggggttggccatgcatttacactttataatggcgagagcgtggtgaggtattgttaataacacaattgtagcgagggggtattgctacatatgtcgttatggctcattgattttctgaaatggctaccccagataattgtgacaaaataaaaatattttgttgaaagcctttacataacttgtctagacaagttatactcgttttaagacattaagggagtgaaatatatggctgtaaaaagagaaggtgtaaaagccatcgtaaccgctattgggggaaaagaaaatcttgaagctgcaacgcattgtgtaacacgattacgtttagtgctgaaggatgaaagtaaagttgataaagacgcattaagtaataacgcgttggtcaagggacagttcaaagcagaccatcaatatcaaattgtcattggtccaggaacagtcgatgaagtgtataagcagtttattgatgaaacaggtgctcaagaagcttcgaaagatgaagcgaaacaagcagctgcgcaaaaagggaatccagtacaacgtttgattaaattgttgggggatatttttataccaatattacctgcgattgtgacagctggtttgttaatggggatcaataatttacttacaatgaaaggtttatttggtccaaaagcacttattgagatgtatccacaaattgctgatatttcaaacatcattaatgtgattgcgagtacggcatttattttcttaccagcattaattggttggagtagtatgcgtgtatttggtggtagtccgattctaggcttagtcttaggtttgattttaatgcacccgcaattagtatctcagtatgatttggcaaaagggaatattccgacgtggaacttatttggcttagagattaagcagttgaattaccaaggtcaagtgttgcctgttttaattgcagcttatgttctagctaaaattgaaaaaggattaaataaagtcgttcacgattcgataaaaatgttggtcgttggacccgtagcgcttttagttactggatttttagcatttattatcattggaccagttgcgttattgattggtacaggtatcacatctggtgttacatttatattccaacatgcaggatggcttggcggagcaatatatggattgttatatgcaccacttgtaattacaggactacaccatatgtttttagcagtagatttccaattgatgggtagcagcttaggtggtacgtacttatggccaatcgttgcgatttcaaatatttgtcaggggtctgcagcatttggagcatggtttgtctataaacgtcgtaaaatggttaaagaagaaggcttggcattaacatctggtatttctggtatgttaggtgttactgaaccagctatgtttggtgtgaacttacctctgaaatatccatttatcgctgcgatatcaacgtcttgtgtattgggggcaatcgttggtatgaataacgtacttggaaaagttggtgttggtggtgtgccagcattcatttcaattcaaaaagaattttggccagtatatcttattgtgacagctattgctattgttgtaccatgtatactaacaattgtgatgtctcattttagtaaacaaaaagcgaaagaaattgttgaagattaataaaataaaaaaggggcgttcgttatttggacgtcctttattacgttataaggtggtaattgtgtgtcgaaagaaatagattggagaaaatccgttgtatatcaaatttatcctaagtcgtttaatgatacgacggggaatggtataggagatattaacggaattatagaaaaattggattatatcaagttattgggtgttgattatatttggttaacaccagtgtatgaatcaccgatgaatgataatggctatgatatcagcaattatttagaaatcaatgaagactttggaacgatggatgattttgaaaagttaatcaaagttgctcatcaaaaagacttgaaagtgatgttagatattgtcattaatcatacgtctacggagcatgaatggtttaaagaagcccgtaaatctaaagacaacccttatagagattattactttttcagatcatctgaagacgggccgccaacaaattggcattctaaatttggtggtaatgcatggaagtatgatcctgagacagatgaatattatttacatttatttgatgtcagtcaagctgatttaaattgggataatccggaagtacgtcaatcgttatatcgcattgtcaatcattggatagacttcggcgttgatggttttcgatttgatgtcattaacttaatttctaaaggtgaatttaaggactctgacaaaataggtaaagaattttatacggatggtcctagagtgcatgagtttctgcatgaattaaatcgtcaaacgtttggtaacactgacatgatgactgtaggagaaatgtcttcgacgacgattgaaaattgtattaagtatacacagccagaacgccaagaattgaatagtgtttttaattttcatcatctaaaggttgattatgttgatggtgaaaagtggacaaatgcgaagcttgattttcataagttaaaggaaattctgatgcaatggcaacgaggtatttatgacggtggcggatggaacgcgattttctggtgtaatcatgatcagccacgggtagtgtctagatttggtgatgatacgtcggaagagatgaggatacaaagtgctaaaatgttagctatcgcactgcatatgttgcaagggacgccatatatttaccaaggtgaagaaattggtatgacggacccacattttacatcaatagcacaatatcgcgatgttgaatcgattaatgcctaccatcagttgttaagtgatgggcatgctgaagcggatgtgttagcgattttaggacagaagtcacgagacaattcgagaacgcctatgcaatggagtgatgatgttaatgctggatttacagctggtaagccttggattgatatttcggaaaattatcatcaggtcaacgttagacaagcacttcagaataaagattctattttctatacgtatcaaaaattaatacaattaagacatacgcatgatattattacgtatggagacattgtgccacgttttatggatcatgataatttatttgtttatgaacgtcattataagaatcaacaatggctagtaattgcgaatttctcagcatcggctgttgatttgccagaaggattggctagcgaaggtcgtgttgtgattcaaacaggcacagtggaaaataatacgataagcgggtttggtgcaattgtaatcgaaacaaacgcgtaaaataaattgagtggatgcgtttatatggtgaagcaaaagaagtttatgaagatttatgaggcgttgaaagaagatatattaaacgggcagattcaatatggtgaacaaattccgtctgaacatgatttggtgcaattgtaccagtcatctcgagagaccgtgcgtaaggcattagatttgttggcattagacggtatgattcaaaagattcatggtaaagggtcacttgtcatttatcaggaggttacagagtttccattttctgaacttgttagttttaaagaaatgcaagaagaaatgggtgtcgcatatttaactgaagttgttgtgaatgaggttgttgaagcgcatgaagttccagaagttcaacatgctttaaacatcaattctagtgaatcgctcattcatattgttagaactcgtcggcttaaccaacatgtgaagattgttgatgaagattattttctaaagtcgattgtttcagatataggtaatgatgttgcgagtgattctatttatgattatttggaaaaggtattaaatcttaatattagttattcaagtaagtctattacttttgaaccgtttgatgaacaagcatatcaattgtttggtgatatatcggtggcttattcagcaacagttcgaagtattgtgtatttagaaaatacaatgccgtttcaatataatatttcaaaacatcttgcaaatgaatttaaatttaatgacttctcaagacgtcgtacaaagtaaacaatgatataaatgatttatacttgcaattaactattaaaatatagtaatatatatcttgccgtgctaggtggggaggtagcggttccctgtactcgaaatccgctttatgcgaggcttaattcctttgttgaggccgtatttttgcgaagtctgcccaaagcacgtagtgtttgaagatttcggtcctatgcaatatgaacccatgaaccatgtcaggtcctgacggaagcagcattaagtggatcatcatatgtgccgtagggtagccgagatttagctaacgactttggttacgttcgtgaattacgttcgatgcttaggtgcacggttttttatttttaaaaatattaaatcgattattaagagttgaaaatatataattatagaagctactttcttgaagacaattcagcgtattatacgtggaacatgtttgtgggaagtagcttttttatatgtgaagtttgattcaagtgaaatcgatgcgcagtttgaataaatttttacggatataaaaagtaagaagttattatttgatgataaagaaatgatggtgaaatgagggggagtatcttacaatagaattattaatgagatacgttatgattattgacaatcaaatccctacggaggacatatgcaaatatatttaagtactttaacagagttagattatgataaatctttaaatagtattgaagaaagttttgatgataatcctgaaacgagttggcaagcacgtgcgaaagtgaaaaatttaaggaaatctccttgctataattttgaattagaagtaatagcgaaaaatgaaaataacgatgtcgttggacacgttttattaattgaagtagaaatgaatagtgatgacaagacgtattatggtttggcgattgcctctttatcagttcatcctgaattacgtggacaaaaattaggtcgtggattggttcaagcagtagaagaacgtgcaaaagcgcaagagtatagtacggttgttgtagaccattgttttgactactttgaaaagttgggttatcagaatgctgctgagcatgacattaaattagaatctggtgatgcaccgttacttgtaaaatatttatgggataatttgacggatgcaccacacggaatcgtaaaatttccagaacatttttattaattgttcatttaagaagtaaaggtattatcatgctataatgaaaggtaattgtttatggaggtgctaacttgaattatcaagccttatatcgtatgtacagaccccaaagtttcgaggatgtcgtcggacaagaacatgtcacgaagacattgcgcaatgcgatttcgaaagaaaaacagtcgcatgcatatatttttagtggtccgagaggtacggggaaaacgagtattgccaaagtgtttgctaaagcaatcaactgtttaaatagcactgatggagaaccttgtaatgaatgtcatatttgtaaaggcattacgcaggggactaattcagatgtgatagaaattgatgctgctagtaataatggcgttgatgaaataagaaatattagagacaaagttaaatatgcaccaagtgaatcgaaatataaagtttatattatagatgaggtgcacatgctaacaacaggtgcttttaatgcccttttaaagacgttagaagaacctccagcacacgctatttttatattggcaacgacagaaccacataaaattcctccaacaatcatttctagggcacaacgttttgattttaaagcaattagcctagatcaaattgttgaacgtttaaaatttgtagcagatgcacaacaaattgaatgtgaagatgaagccttggcatttatcgctaaagcgtctgaagggggtatgcgtgatgcattaagtattatggatcaggctattgctttcggcgatggtacattgacattacaagatgccctaaatgttacgggtagcgttcatgatgaagcgttggatcacttgtttgatgatattgtacaaggtgatgtacaagcatcttttaaaaaataccatcagtttataacagaaggtaaagaagtgaatcgcctaataaatgatatgatttattttgtcagagatacgattatgaataaaacatctgagaaagatactgagtatcgagccctgatgaacttagaattagatatgttatatcaaatgattgatcttattaatgatacattagtgtcgattcgttttagtgtgaatcaaaacgttcattttgaagtgttgttagtaaaattagctgagcagattaagggtcaaccacaagtgattgcgaatgtagctgaaccagcacaaattgcttcatcgccaaacacagatgtattgttgcaacgtatggaacagttagagcaagaactaaaaacactaaaagcacaaggagtgagcgtcgctcctactcaaaaatcttcgaaaaagcctgcgagaggcatacaaaaatctaaaaatgcattttcaatgcaacaaattgcaaaagtgctagataaagcgaataaggcagatatcaaattgttgaaagatcattggcaagaagtgattgatcatgccaaaaacaatgataaaaaatcactcgttagtttattgcaaaattcggaacctgtggcggcaagtgaagatcacgtacttgtgaaatttgaggaagagatccattgtgaaatcgtcaataaagacgacgagaaacgtagtagtatagaaagtgttgtatgtaatatcgttaataaaaacgttaaagttgttggtgtaccatcagatcaatggcaaagagttcgaacggagtatttacaaaatcgtaaaaacgaaggcggtgatatgccaaagcaacaagcacaacaaacagatattgctcaaaaagcaaaagatcttttcggtgaagaaactgtacatgtgatagatgaagagtgatacatgacaagcgatataatcgtatgtataatgaaagaaacatcattttattgataaatatttattgattttcaaggaggaaatggaatatgcgcggtggcggaaacatgcaacaaatgatgaaacaaatgcaaaaaatgcaaaagaaaatggctcaagaacaagaaaaacttaaagaagagcgtattgtaggaacagctggcggtggcatggttgcagttactgtaactggtcataaagaagttgtcgacgttgaaatcaaagaagaagctgtagacccagatgatattgaaatgctacaagacttagtgttagcagctactaatgaagcgatgaataaagctgatgagcttactcaagaacgtttaggtaaacatactcaaggcttaaacatccctggaatgtgatcatagatgcattatccagaacctatatcaaagcttattgatagctttatgaaattgccaggcattggtccaaagacagcccaacgtctggcttttcataccttagatatgaaagaagacgatgttgttcagtttgccaaagcattagtagatgttaaaagagaattaacatattgtagcgtatgtggtcacattactgaaaatgatccatgttatatttgtgaagataagcaaagagatcgttcagttatttgtgttgtggaagatgacaaagatgtcatagctatggaaaaaatgagagaatacaaaggtttatatcacgttttacatgggtctatttcgcctatggatggaattggaccagaagatattaatattccttcattgattgaacgcttgaaaaacgatgaagttagcgaattaatcttagctatgaacccgaacttagagggggaatctacagccatgtatatttctagattagttaagcctataggtatcaaagtgacgagattagcacaaggattatcggtaggtggcgatttagagtatgctgacgaagtaacattatctaaagcaatcgcaggtagaacagaaatgtaatgtcttctattaaacatttttgaatttaatactatagtaagaaaagtcacagtgtaatcattgtggcttttttttatggtgtggtgtactactttatttgtggtgtgttggtggcatggtttacctagttttactgagggtggggaatatttaggaagcaagccgttggttgtgatttgttacttttaatagtaatgattcgaattggattatcgaagtaggaataccgttatggtgtgttggtgttattaatttgataaatgcggttgatggttaatgactatgcaaatgaaattcttttgtaattgaaatgatagatgctggcttagtagttgtacttctttggtctaaagcttactaaatcagcctgtatagcggtgttttgagagattatttaaaacttgtaaatttatttttaatttctggtaaaaaaataacgttctgttttgcggtttttttattatcttttcataaaaataaccaccttatttgttttagaaaacgtactattcacaattgtaatttctttaagttcgatttttagaatgagagcgttcagaatggatagtaaaggtgtaatttttactgttgttaagcagtttgaaagcctgtatagtatttatttgttgaggcaaacaaaacaactcaacttaagaaataacttgaattactaacgaaaattaattttaaaaagttgttgacttaaatgttaataaaatgtataattaattcttgtcggtaagaaaatgaacattgaaaactgaatgacaatatgtcaacgttaattccaaaaacgtaactattagttacaaacattatttagtatttatgagctaatcaaacatcataatttttatggagagtttgatcctggctcaggatgaacgctggcggcgtgcctaatacatgcaagtcgagcgaacggacgagaagcttgcttctctgatgttagcggcggacgggtgagtaacacgtggataacctacctataagactgggataacttcgggaaaccggagctaataccggataatattttgaaccgcatggttcaaaagtgaaagacggtcttgctgtcacttatagatggatccgcgctgcattagctagttggtaaggtaacggcttaccaaggcaacgatgcatagccgacctgagagggtgatcggccacactggaactgagacacggtccagactcctacgggaggcagcagtagggaatcttccgcaatgggcgaaagcctgacggagcaacgccgcgtgagtgatgaaggtcttcggatcgtaaaactctgttattagggaagaacatatgtgtaagtaactgtgcacatcttgacggtacctaatcagaaagccacggctaactacgtgccagcagccgcggtaatacgtaggtggcaagcgttatccggaattattgggcgtaaagcgcgcgtaggcggttttttaagtctgatgtgaaagcccacggctcaaccgtggagggtcattggaaactggaaaacttgagtgcagaagaggaaagtggaattccatgtgtagcggtgaaatgcgcagagatatggaggaacaccagtggcgaaggcgactttctggtctgtaactgacgctgatgtgcgaaagcgtggggatcaaacaggattagataccctggtagtccacgccgtaaacgatgagtgctaagtgttagggggtttccgccccttagtgctgcagctaacgcattaagcactccgcctggggagtacgaccgcaaggttgaaactcaaaggaattgacggggacccgcacaagcggtggagcatgtggtttaattcgaagcaacgcgaagaaccttaccaaatcttgacatcctttgacaactctagagatagagccttccccttcgggggacaaagtgacaggtggtgcatggttgtcgtcagctcgtgtcgtgagatgttgggttaagtcccgcaacgagcgcaacccttaagcttagttgccatcattaagttgggcactctaagttgactgccggtgacaaaccggaggaaggtggggatgacgtcaaatcatcatgccccttatgatttgggctacacacgtgctacaatggacaatacaaagggcagcgaaaccgcgaggtcaagcaaatcccataaagttgttctcagttcggattgtagtctgcaactcgactacatgaagctggaatcgctagtaatcgtagatcagcatgctacggtgaatacgttcccgggtcttgtacacaccgcccgtcacaccacgagagtttgtaacacccgaagccggtggagtaaccttttaggagctagccgtcgaaggtgggacaaatgattggggtgaagtcgtaacaaggtagccgtatcggaaggtgcggctggatcacctcctttctaaggatatattcggaacatcttcttcagaagatgcggaataacgtgacatattgtattcagttttgaatgtttatttaacattcaaatattttttggttaaagcgatattgcttatgcgagcgcttgactaaaaagaaattgtacattgaaaactagataagtaagtaaaatatagattttaccaagcaaaaccgagtgaataaagagttttaaataagcttgaattcataagaaataatcgctagtgttcgaaagaacactcacaagattaataacgcgtttaaatctttttataaaagaaaacgtttagcagacaatgagttaaattattttaaagcagagtttacttatgtaaatgagcatttaaaataatgaaaacgaagccgtatgttaacgtttgacttataaaaatggtggaaacatagattaagttattaagggcgcacggtggatgccttggcactagaagccgatgaaggacgttactaacgacgatatgctttggggagctgtaagtaagctttgatccagagatttccgaatggggaaacccagcatgagttatgtcatgttatcgatatgtgaatacatagcatatcagaaggcacacccggagaactgaaacatcttagtacccggaggaagagaaagaaaattcgattcccttagtagcggcgagcgaaacgggaagagcccaaaccaacaagcttgcttgttggggttgtaggacactctatacggagttacaaaggacgacattagacgaatcatctggaaagatgaatcaaagaaggtaataatcctgtagtcgaaaatgttgtctctcttgagtggatcctgagtacgacggagcacgtgaaattccgtcggaatctgggaggaccatctcctaaggctaaatactctctagtgaccgatagtgaaccagtaccgtgagggaaaggtgaaaagcaccccggaaggggagtgaaatagaacctgaaaccgtgtgcttacaagtagtcagagcccgttaatgggtgatggcgtgccttttgtagaatgaaccggcgagttacgatttgatgcaaggttaagcagtaaatgtggagccgtagcgaaagcgagtctgaatagggcgtttagtatttggtcgtagacccgaaaccaggtgatctacccttggtcaggttgaagttcaggtaacactgaatggaggaccgaaccgacttacgttgaaaagtgagcggatgaactgagggtagcggagaaattccaatcgaacctggagatagctggttctctccgaaatagctttagggctagcctcaagtgatgattattggaggtagagcactgtttggacgaggggcccctctcgggttaccgaattcagacaaactccgaatgccaattaatttaacttgggagtcagaacatgggtgataaggtccgtgttcgaaagggaaacagcccagaccaccagctaaggtcccaaaatatatgttaagtggaaaaggatgtggcgttgcccagacaactaggatgttggcttagaagcagccatcatttaaagagtgcgtaatagctcactagtcgagtgacactgcgccgaaaatgtaccggggctaaacatattaccgaagctgtggattgtcctttggacaatggtaggagagcgttctaagggcgttgaagcatgatcgtaaggacatgtggagcgcttagaagtgagaatgccggtgtgagtagcgaaagacgggtgagaatcccgtccaccgattgactaaggtttccagaggaaggctcgtccgctctgggttagtcgggtcctaagctgaggccgacaggcgtaggcgatggataacaggttgatattcctgtaccacctataatcgttttaatcgatggggggacgcagtaggataggcgaagcgtgcgattggattgcacgtctaagcagtaaggctgagtattaggcaaatccggtactcgttaaggctgagctgtgatggggagaagacattgtgtcttcgagtcgttgatttcacactgccgagaaaagcctctagatagaaaataggtgcccgtaccgcaaaccgacacaggtagtcaagatgagaattctaaggtgagcgagcgaactctcgttaaggaactcggcaaaatgaccccgtaacttcgggagaaggggtgctctttagggttaacgcccagaagagccgcagtgaataggcccaagcgactgtttatcaaaaacacaggtctctgctaaaccgtaaggtgatgtataggggctgacgcctgcccggtgctggaaggttaagaggagtggttagcttctgcgaagctacgaatcgaagccccagtaaacggcggccgtaactataacggtcctaaggtagcgaaattccttgtcgggtaagttccgacccgcacgaaaggcgtaacgatttgggcactgtctcaacgagagactcggtgaaatcatagtacctgtgaagatgcaggttacccgcgacaggacggaaagaccccgtggagctttactgtagcctgatattgaaattcggcacagcttgtacaggataggtaggagcctttgaaacgtgagcgctagcttacgtggaggcgctggtgggatactaccctagctgtgttggctttctaacccgcaccacttatcgtggtgggagacagtgtcaggcgggcagtttgactggggcggtcgcctcctaaaaggtaacggaggcgctcaaaggttccctcagaatggttggaaatcattcatagagtgtaaaggcataagggagcttgactgcgagacctacaagtcgagcagggtcgaaagacggacttagtgatccggtggttccgcatggaagggccatcgctcaacggataaaagctaccccggggataacaggcttatctcccccaagagttcacatcgacggggaggtttggcacctcgatgtcggctcatcgcatcctggggctgtagtcggtcccaagggttgggctgttcgcccattaaagcggtacgcgagctgggttcagaacgtcgtgagacagttcggtccctatccgtcgtgggcgtaggaaatttgagaggagctgtccttagtacgagaggaccgggatggacatacctctggtgtaccagttgtcgtgccaacggcatagctgggtagctatgtgtggacgggataagtgctgaaagcatctaagcatgaagcccccctcaagatgagatttcccaacttcggttataagatccctcaaagatgatgaggttaataggttcgaggtggaagcatggtgacatgtggagctgacgaatactaatcgatcgaagacttaatcaaaataaatgttttgcgaagcaaaattacttttacttactatctagttttgaatgtataaattacattcatatgtctggtgactatagcaaggaggtcacacctgttcccatgccgaacacagaagttaagctccttagcgtcgatggtagtcgaacttacgttccgctagagtagaacgttgccaggcaaaaaatggatgcgatgagccgcattgagaccgcaaggtctcttttttttatgtctaaaacgtcaaaataaaaagcaaacacaaagaaaaatggcttggcgaagtgaaaacgtttgaatctgacgaaacaagaaaagagcgcaacgagtttagtagagctaaatgagtaagtgagagccgaaggagaggaaagaagcaagcgattgtcacaagtcaagaaaggttcttagcgacgatggtagccaacttacgttccgctagagtagaacgttgccaggcaaaaaatggatgcgatgagccgcattgagaccgcaaggtctcttttttttatgtctaaaacttcaaaataaaagttaatacaaagaaaaatggcttggcgaagtgaaaacgtttgaatctgacgaaacgagaaaagagcgcaacgagtttagtagagctaaatgagtaagtgagagccgaaggagaggaaagaagcaagcgattgtcacaagtcaagaaaggttcttagcgacgatggtagctaacttacgttccgctagagtagaacgttgccaggcaaaaaatggatgcgatgagccgcattgagttttggaaatgataattaaataatgtgcatttttgattatttaaatctgtgactagaagtataagtgaagacattcagaagtattataaaaagtgaaaagcagtaagatagtttttaatcataaatcatcttactgctgtttttaggttttatgtctaatatcttttaaatcgaaatacaaaaaggaaattaattattatacaatagacaagctattgcataagtaacactaacttttgtcaaagaagtgttactatataattaatacttttgaaagtaactaattcaaaacattgtaaataaaggaagcgtatatcatgaagcaacctattttaaataaattagaaagtttaaatcaagaagaagcgatttctttgcatgttccgggtcataaaaatatgactatcggtcatttatctcaattatcaatgacaatggataaaactgaaatacctggattagatgatttacatcatcctgaagaagtcattttggaaagtatgaagcaggtggagaaacattcagattatgatggttatttcttagtgaatggcaccacttcgggaatattatctgtcatccagtctttttcacagaaaaaaggcgatatcttaatggcaagaaatgtacataaatctgtattacatgcgctcgatattagtcagcaagaagggcattttattgaaacgcatcaaagtccgttaacgaatcattataataaagttaatttaagccgtttgaataatgacggtcacaaacttgctgtgttgacttatcctaactattacggtgaaacatttaatgtagaagaggttatcaaatctttgcaccaattaaatattcctgtactcattgacgaagcacacggcgcgcactttggattgcaaggatttccagattctacattaaattatcaagctgactatgttgttcaatcttttcataaaacgttaccagctttaacgatgggctcggtactttatattcataaaaatgcaccttataaagaaaatattatagaatatctaagctatttccaaacatctagtccttcatatttgattatggctagtttagagtcagctgcccagttctataaaacatatgatagtaccgtgttttttgataagagagcacaattaatcgaatgtttggagaagaaaggttttgaaatgcttcaggttgatgatccgttgaagttgttgataaaatatgaaggctttacaggtcatgatattcaaaattggtttatgaatgcacatatctatttagaattagctgacgactatcaagcattagcgatattgccgttatggcatcatgatgatacgtatttatttgattcacttttacgtaaaattgaagatatgattttaccgaaaaaatcagtttctatagttaaacaaacacaacttttaacaactgaaggtaactataaaccaaaacgctttgaatatgttacttggtgtgatttgaaaaaggcaaaaggtaaagttctggcgcgacatattgtcccatatccgccagggattcctattattttcaaaggagaaacaataactgaaaatatgatagaattggtaaatgaatatctggaaactggaatgatagttgaaggaattaaaaataataaaattttagttgaggatgaataaaatgtcagcttttataacttttgagggcccagaaggctcaggtaaaacaactgtaattaatgaagtttatcatagattagtaaaggattatgatgtcattatgactagagaaccaggtggtgttcctactggtgaagaaatacgtaaaattgtattagaaggcaatgatatggacattagaactgaagcaatgttatttgctgcatctagaagagaacatcttgtattaaaggtcataccagctttaaaagaaggtaaggttgtgttgtgtgatcgctatatcgatagttcattagcttatcaaggttatgctagagggattggcgttgaagaagtaagagcattaaacgaatttgcaataaatggattatatccagacttgacgatttatttaaatgttagtgctgaagtaggtcgcgaacgtattattaaaaattcaagagatcaaaatagattagatcaagaagatttaaagtttcacgaaaaagtaattgaaggttaccaagaaatcattcataatgaatcacaacggttcaaaagcgttaatgcagatcaacctcttgaaaatgttgttgaagacacgtatcaaactatcatcaaatatttagaaaagatatgatataattgttagaagaggtgttataaaatgaaaatgattatagcgatcgtacaagatcaagatagtcaggaacttgcagatcaacttgttaaaaataactttagagcaacaaaattggcaacaacaggtgggtttttaagagcaggtaatacaacattcttatgtggtgtcaatgatgaccgtgtagatgaaatattgtctgtgattaatcaaacgtgtggtaatagagaacagttggtttcacctattacacctatgggaggcagtgcggattcgtacattccatatccagttgaagttgaagttggcggtgctactgtatttgttatgccagttgatgcattccatcaattttaattctataatacaatcatcaattagagatacttaaaatagtgtattaataagttattaacaattttgggttgcttgactgcgactagttcagatgccaatagatttgatttttgtggttctaagaataatcacaaatcatggtcgctattgttgcagtaattagttgctctttggcaacctttttatataaaagcaaaagggagtttgtaatgaatggatgaacagcaacaattgacgaatgcatatcattcaaataaattatcgcatgcctatttatttgaaggtgatgatgcacaaacgatgaaacaagttgcgattaattttgcaaagcttattttatgtcaaacagatagtcaatgtgaaacaaaggttagtacatataatcatccagactttatgtatatatcaacaactgagaatgcaattaagaaagaacaagttgaacaacttgtgcgtcatatgaatcaacttcctatagaaagcacaaataaagtgtacatcattgaagactttgaaaagttaactgttcaaggggaaaacagtatcttgaaatttcttgaagaaccaccggacaatacgattgctattttattgtctacaaaacctgagcaaattttagacacaatccattcaaggtgtcagcatgtatatttcaagcctattgataaagaaaagtttataaatagattagttgaacaagacatgcctaagccagtagctgaaatgattagtacttatactacgcaaatagataatgcaattgctttaaatgaagaatttgatttattagcattaaggaaatcagttatacgttggtgtgaattgttgcttactaataagtcaatggcacttataggtattattgatttattgaaacaggctaaaaataaaaaactgcaatctttaactattgcagctgtgaatggtttcttcgaagatatcatacatacaaaggtaaatgtagaggataaacaaatatatagtgatttaaaaaatgatattgatcaatatgcgcaaaagttgtcgtttaatcaattaattttgatgtttgatcaactgacggaagcacataagaaattgaatcaaaatgtaaatccaacgcttgtatttgaacaaatcgtaattaagggtgtgagttagatgccaaatgtaataggtgttcagtttcaaaaagcgggaaaattagaatattatacacctaatgatatacaagtagatatagatgactgggtagttgtcgaatctaaaagaggcatagagataggtattgttaaaaatccattaatggatattgctgaagaggatgttgtgttacctcttaaaaatattattcgcattgctgatgacaaagatattgataaatttaattgtaatgaacgcgatgctgaaaatgcattaatactatgtaaagacattgtaagagaacaaggtttggacatgcgtttagtcaattgcgaatataccttagataaatcgaaagttatttttaattttacggcggatgatcgtattgattttagaaaattagtgaaaatattagcgcaacatttaaaaacacgtatcgagttgagacaaattggtgtaagggatgaagccaaattgcttggcggtatcggaccttgtggtaggtcgttatgttgttctacatttttaggagattttgaaccagtatcgattaagatggctaaggatcaaaatttatcattaaatccaactaaaatttccggtgcatgtggtcgtttgatgtgttgtttaaaatatgaaaatgactactatgaggaagtacatgcgcaattacctgatatcggtgaagcaattgaaacgcctgatggtaacgggaaagtagttgctttaaatatattagacatttctatgcaggtgaagcttgagggacatgaacagccacttgaatataaattagaagaaatagaaactatgcattaaggaggcattattacatttggatcgcaatgaaatatttgaaaaaataatgcgtttagaaatgaatgtcaatcaactttcaaaggaaacttcagaattaaaggcacttgcagttgaattagtagaagaaaatgtagcgcttcaacttgaaaatgataatttgaaaaaggtgttgggcaatgatgaaccaactactattgatactgcgaattcaaaaccagcaaaagctgtgaaaaagccattaccaagtaaagataatttggctatattgtatggagaaggatttcatatttgtaaaggcgaattatttggaaaacatcgacatggtgaagattgtctgttctgtttagaagttttaagtgattaatcaagcactctcaaatagtgttataattataaatgaatatggtttggataagtctgagacaatgcatgtttcaggctttaattgtgtataaagttttggtgattgcataagagatggcggtactaaatgttattattaagtgtgcacgcagtatcattagttataaaatgtagctgttaaaagtcaaaaatacatcgaatgtagttaggcatataatataaaaagagatttcaattactcaatagaaaaaggttttcttcataggagttaaaaatgttaaaagagaatgaacgatttgatcaactaatcaaagaagattttagtattattcaaaatgatgatgttttttcgttttcaacggatgctttgttgttagggcattttacaaaacctagaacaaaagatattgtattggacttatgttcaggcaatggggtgatacccttgttattgtttgcgaaacatccgcgacatatagaaggtgttgagattcaaaaaacacttgtcgatatggcgcgacgcacatttcaattcaatgatgttgatgaatatttaacaatgcatcacatggatttgaaaaacgttactaaagtatttaaaccttcacaatatactttagtaacgtgtaatccgccttattttaaagagaatcagcaacaccaacatcaaaaagaagcacataagatagcgagacatgagattatgtgtacacttgaagattgcatgattgcagcccgtcatttattaaaagaaggtggcaggctaaacatggtacatcgtgcagatagactaatggatgtcttgtttgaaatgagaaaagtgaatattgaacctaagaaagtcgtttttatatatagtaaagtagggaaatcggcacaaacgatagttgtagaaggtcgaaaaggtggaaatcaaggtttagaaatcatgcccccgttttatatttataatgaagatggtaattatagtgaagaaatgaaggaagtatattatggatagtcattttgtatatattgtaaaatgtagtgatggaagtttatatacaggatacgctaaagacgttaatgcacgtgttgaaaaacataaccgaggtcaaggagccaaatatacgaaagtaagacgtccggtgcatttagtttatcaagaaatgtatgagacaaagtctgaagcattgaagcgtgaatatgaaattaaaacttataccagacaaaagaaattgcgattaattaaggagcgatagtatggctgtattatatttagtgggcacaccaattggtaatttagcagatattacttatagagcagttgatgtattgaaacgtgttgatatgattgcttgtgaagacactagagtaactagtaagctgtgtaatcattatgatattccaactccattaaagtcatatcacgaacataacaaggataagcagactgcttttatcattgaacagttagaattaggtcttgacgttgcgctcgtatctgatgctggattgcccttaattagtgatcctggatacgaattagtagtggcagccagagaagctaatattaaagtagagactgtgcctggacctaatgctgggctgacggctttgatggctagtggattaccttcatatgtatatacatttttaggatttttgccacgaaaagagaaagaaaaaagtgctgtattagagcaacgtatgcatgaaaatagcacattaattatatacgaatcaccgcatcgtgtgacagatacattaaaaacaattgcaaagatagatgcaacacgacaagtatcactagggcgtgaattgactaagaagttcgaacaagttgtaactgatgatgtaacacaattacaagcattgattcagcaaggcgatgtaccattgaaaggcgaattcgttatcttgattgagggtgctaaagcgaacaatgagatatcgtggtttgatgatttatctatcaatgaacatgttgatcattatattcaaacttcacagatgaaaccaaaacaagctattaaaaaagttgctgaagaacgacaacttaaaacgaatgaagtatataatacttatcatcaaataagttaatcactttatcgattatatgaaattttaaacgattttataaacgcaagctgtaattttaaatggtaagttatcattttgcattgatactgataaaatgatgttgactatgataaaaaaatgatgacatcgacgttttttaatgtaaaataaatacattgaaagtaataaataccttaacattgaataagatgaaaatgagatgacgagataaatgttcgcgtccgttgaaatgcatagaaatcttagatattatttgaagtgagacattacgaggaggaacagttatggctaaagaaacattttatataacaaccccaatatactatcctagtgggaatttacatataggacatgcatattctacagtggctggagatgttattgcaagatataagagaatgcaaggatatgatgttcgttatttgactggaacggatgaacacggtcaaaaaattcaagaaaaagctcaaaaagctggtaagacagaaattgaatatttggatgagatgattgctggaattaaacaattgtgggctaagcttgaaatttcaaatgatgattttatcagaacaactgaagaacgtcataaacatgtcgttgagcaagtatttgaacgtttattaaagcaaggtgatatctatttaggtgaatatgaaggttggtattctgttccggatgaaacatactacacagagtcacaattagtagacccacaatacgaaaacggtaaaattattggtggtaaaagtccagattctggacatgaagttgaactagttaaagaagaaagttatttctttaatattagtaaatatacagaccgtctattagaattctatgaccaaaatccagattttatacaaccaccatcaagaaaaaatgaaatgattaacaacttcattaaaccaggacttgctgatttggctgtttctcgtacatcatttaactggggtgtccatgttccgtctaatccaaaacatgttgtttatgtttggattgatgcgttagttaactatatttcagcattaggctatttatcagatgatgagtcactatttaacaaatactggccagcagatattcatttaatggctaaggaaattgtgcgattccactcaattatttggcctattttattgatggcattagacttaccgttacctaaaaaagtctttgcacatggttggattttgatgaaagatggaaaaatgagtaaatctaaaggtaatgtcgtagacccgaatattttaattgatcgctatggtttagatgccacacgttattatctaatgcgtgaattaccatttggttcagatggcgtatttacacctgaagcatttgttgagcgtacaaatttcgatctagcaaatgacttaggcaacttagtaaaccgtacgatttctatgattaataagtactttgatggcgaattaccagcgtatcaaggtccacttcatgaattagatgaagaaatggaagctatggctttagaaacagtgaaaagctatactgaaagcatggaaagtttgcaattttctgtggcattatctacgatatggaagtttattagtagaacgaataagtatattgacgaaacaacgccttgggtattagctaaggacgatagccaaaaagatatgttaggcaatgttatggctcacttagttgaaaatattcgttatgcagctgtattattacgtccattcttaactcatgcgccgaaagagatttttgaacaattgaacattaacaatcctcaatttatggaatttagtagtttagcgcaatatggtgtgcttactgagccaattatggttactgggcaacctaaacctattttcccaagattggatagcgaagcggaaattgcatatatcaaagaatcaatgcaaccgcctgctactgaagaggaaaaagaagagattcctagcaaaccacaaattgatattaaagactttgataaagttgaaattaaggcagcaacgattattgatgctgaacatgttaagaagtcagataagcttttaaaaattcaagtagacttagattctgaacaaagacaaattgtatcaggaattgccaaattctatacaccagatgatattattggtaaaaaagtagcagttgttactaacttgaaaccagctaaattaatgggacaaaaatctgaaggtatgatattatctgctgaaaaagatggtgtattaaccttagtaagtttaccaagtgcaattccaaatggtgcagtgattaaataactgtatttttaaaaattaggagagataattatgttaatcgatacacatgtccatttaaatgatgagcaatacgatgatgatttgggtgaagtgattacacgtgctagagaagcaggtgttgatcgtatgtttgtagttggttttaacaaatcgacaattgaacgcgcgatgaaattaatcgatgagtatgattttttatatggcattatcggttggcatccagttgacgcaattgattttacagaagaacacttggaatggattgaatctttagctcagcatccaaaagtgattggtattggtgaaatgggattagattatcactgggataaatctcctgcagatgttcaaaaggaagtttttagaaagcaaattgctttagctaagcgtttgaagttaccaattatcattcataaccgtgaagcaacacaagactgtatcgatatcttattggaggagcatgctgaagaggtaggcgggattatgcatagctttagtggttctccagaaattgcagatattgtaactaataagctgaatttttatatttcattaggtggacctgtgacatttaaaaatgctaaacagcctaaagaagttgctaagcatgtgtcaatggagcgattgcttgttgaaaccgatgcaccgtatctttcgccacatccgtatagagggaagcgaaatgaaccggcaagagtaactttagtagctgaacaaattgctgaattaaaaggcttatcttatgaagaagtgtgcgaacaaacaactaaaaatgcagagaaattgtttaatttaaattcataaagttaaaagtgagaaagatcaccgccataaatgcaaacgatgctatattcgtttaatatgctatggttctttctcacttttttaaattaaaatatcgtgcatgtgcaatacgtgcgatagagatggttagtgctttgaaattaagaattgtaggaaggcgttttaaatgaaaatcaatgagtttatagttgtagaaggacgagatgatactgagcgtgttaaacgagctgttgaatgtgatacgattgaaacgaatggtagtgccatcaacgaacaaactttagaagtaattagaaatgctcaacaaagtcgaggcgttattgtattaacagatccagatttcccaggagataaaattagaagtacaattactgaacatgtcaaaggtgttaaacacgcgtatattgatagagaaaaagctaaaaataaaaaagggaaaattggtgttgaacatgccgacttaattgatattaaagaagcgttaatgcatgttagttcaccctttgatgaagcttatgaatcaattgataaatctgtgcttatagagttggggttaatcgttgggaaagatgcaaggcgccgtagagaaattttaagtagaaaattgcgaatcggccattccaatggtaagcagttattgaaaaagttaaatgcatttggttataccgaagcggatgtaaagcaagctttagaagatgaatgaggaagtgaaaatgttggataataaagatattgcaacaccatcaagaacgcgagcgttgttagataaatatggctttaattttaaaaaaagtttaggacagaactttttaatagatgtgaatatcattaataatatcattgatgcaagtgatattgatgcacaaactggggtgattgaaattggtccaggtatggggtcattgacagaacaattggccagacatgctaaaagagtattggcatttgaaattgatcaacgattaataccggtattaaatgatacattatcaccttatgataatgtgacggtgattaatgaagatattttaaaagcgaatattaaaaaagctgttgaaaatcatttacaagattgcgaaaaaataatggttgttgcaaacctgccgtactatattacgacgccaattttattaaatttaatgcaacaagatataccaattgatggctacgtggtgatgatgcaaaaagaagtgggcgaacgcttaaatgctgaagtaggttcaaaagcatatggttcattatcaattgtcgtacaatactatacagagactagtaaagtattaacggtacctaaatctgtatttatgccaccacctaatgttgattcaatagttgtaaaactgatgcagagaactgaaccgttagtaacagtagataacgaggaagcattctttaagttagcaaaagcagcatttgcacaaagaagaaagacaattaacaataactatcaaaattattttaaagatggtaaacaacacaaagaagtgattttacaatggttagaacaagcgggtattgatccaagacgtcgcggtgaaacgctatctattcaagattttgctaaattgtatgaagaaaagaaaaaattccctcaattagaaaattaaatgattgacaaagcaaagcactattgttaaaatttaaattttgtttgacgaaaacgctgcaaatatggtattatgtaacttgtagcgaggtggagcaatatgccaaaatcaattttggacatcaaaaattctattgattgtcatgtaggaaatcgtattgtactgaaagccaatggaggccgtaagaaaacaataaaacgttctggaattttaaaagaaacatatccgtcagttttcattgttgagttagatcaagacaaacacaactttgagagagtatcttatacatacactgatgtgttaactgaaaatgttcaagtttcatttgaagaggataatcatcacgaatcaattgcacactaaataagacatatagagatgttagacgtttcttagtataagaagtaaatattatgataattatttgagtgttgggcattatgttcaatactctttttatttacaaaatgtttaacactgatgtttcgcttatagatttttcagtaaatggataattgtatttataaacacaaatacaagtaaatactaagtaattagatggagaaaattacttttttattaaaaaaacactaaaaaacaaattaaaatgtcaaatattaattctctttatgttaaaatcatcatattaagataacgaaaagagggcggaaaatgatatatgaaacggcaccagccaaaattaattttacgctcgatacactttttaaaagaaatgatggctatcatgagattgaaatgataatgacaacagttgatttaaatgatcgtttaacttttcataaaagaaaagatcgaaagatagttgttgagattgaacataattatgtgccttctaatcataaaaatcttgcatatcgtgcagcgcaactatttattgagcaatatcaactaaagcaaggtgtaacaatttctatcgataaagaaatacctgtttctgctggcttagctggaggttcggctgatgcagcagcaacgttaagaggattgaatcgactttttaatataggagcgagtttggaagaattagctctactaggcagtaaaatcgggacagatattccgttttgtatttataataaaactgcactatgtactggaagaggagagaaaatcgagtttttaaataaaccaccttcagcttgggtgattcttgctaaaccaaacttaggcatatcatcaccagatatatttaagttgatcaatttagataagcgttacgacgtacatacgaaaatgtgttacgaggccttagaaaatcgagattatcaacaattatgtcaaagtttgtctaatcgattagagccaatttctgtttcaaaacacccacaaatcgataaattaaaaaataatatgttgaaaagtggtgcagatggtgcgttaatgagtggaagcggaccgactgtgtatgggctagcacgaaaagaaagccaagcaaaaaatatttataatgcagttaacggttgttgtaatgaagtgtacttagttagactattaggatagaagggttgaaaagatgagatataaacgaagcgagagaattgtttttatgacgcaatatttgatgaaccatccgaataaattgattccattaactttttttgtgaaaaaatttaaacaggcgaagtcttcaataagtgaagatgtccaaattataaaaaatacattccaaaaagaaaagttaggtacagtaattactactgctggcgcaagtggtggtgttacgtataaaccaatgatgagtaaagaagaggcgactgaagttgttaatgaggtcattactctattagaagagaaagaacgtttgttacctggcgggtatttatttttatcagatttggtaggtaatccatcgctactaaacaaagttggtaagttaattgccagtatttacatggaagaaaaattagatgctgttgttaccattgcgacaaaaggtatttcattggcaaatgcggttgctaatattttaaatttaccagtagtagtgattagaaaagacaacaaggtgactgaaggttctacagtttcaattaattacgtttcaggatcttcaagaaaaatagagacaatggtactttcgaagagaactttagcagaaaattcaaatgttttagttgtcgatgattttatgagggctggtggctctattaatggtgttatgaatttaatgaatgagtttaaagcccatgtaaaaggggtatcagtacttgtagaatcaaaagaagttaaacaaagattgattgaagattatacttccttagtgaaattatctgatgtagatgaatataatcaagagtttaacgtagaacctggcaacagtttatctaagttttcataaaaggagttttagtattatgaaaatcattaacacaacaagattaccggaagcacttggaccatattcgcatgcaacagttgtaaatggtatggtttatacttctggtcagattccattgaatgttgatgggaaaatcgtaagcgctgatgttcaagcacagacaaaacaagttttagaaaatttaaagattgttttggaagaagcaggatctgatttgaattctgttgcgaaagcgaccattttcattaaagatatgaatgatttccaaaaaataaatgaagtgtatggtcaatattttaatgaacacaagccagcgcgtagttgtgtagaggttgcgcgattgccaaaagatgtgaaagtagaaattgaattagtaagtaaaattaaggaattataattttcgattaatatgtttaatcaagcttctaaataaaacagagagatatatactataggggggctcactacatgaaagtgacagatgtaagacttagaaaaatacaaacagatggacgaatgaaagcactcgtttccattacattagatgaagctttcgtaattcatgatttacgtgtaattgaaggaaactctggcttgttcgttgcaatgccaagtaaacgtacaccagatggtgaattccgcgacatcgcgcatcctattaattcagatatgagacaagaaattcaagatgcagtgatgaaagtatatgatgaaacagatgaagtagtaccagataaaaacgctacatcagaagattcagaagaagcttaatcaattttatatttagcgatgtaatacatttgcaataagttgatttgatactgtcgataaagcataaagctttgtcggcagtttttttagtttgtattaatgtttttttatgaaatgaaaggctaataaatatatacgttaacagattatgatgatatgaaaattattgattcattgctgataaaaattgcgtttgaatgatgctcgtatttttgaagtaagaaaaagttgtttttaaaattacaacgaattaaaaacaatgccttttatatgttgaaagagtattgcagattaaattataataatgacgaagtgtaaaatttaatgggggttaatgttcatgcgaagacacgcgataattttggcagcaggtaaaggcacaagaatgaaatctaaaaagtataaagtgctacacgaggttgctgggaaacctatggtcgaacatgtattggaaagtgtgaaaggctctggtgtcgatcaagttgtaaccatcgtaggacatggtgctgaaagtgtaaaaggacatttaggcgagcgttctttatacagttttcaagaggaacaactcggtactgcgcatgcagtgcaaatggcgaaatcacacttagaagacaaggaaggtacgacgatcgttgtatgtggtgatacaccgctcatcacaaaggaaacattagaaacattgattgcgcatcacgaggatgctaatgctcaagcaactgtattatctgcatcgattcaacaaccatatggatacggaagaatcgttcgaaatgcgtcaggtcgtttagaacgcatagttgaagagaaagatgcaacgcatgctgaaaaggatattaatgaaattagttcaggtatttttgcgtttaataataaaacgttgtttgaaaaattaacacaagtgaaaaatgataatgcgcaaggtgaatattacctccctgatgtattgtcgttaattttaaatgatggcggcatcgtagaagtctatcgtaccaatgatgttgaagaaatcatgggtgtaaatgatcgtgtaatgcttagtcaggctgagaaggcgatgcaacgtcgtaccaatcattatcacatgttaaatggtgtgacaatcatcgatcctgacagcacttttattggtccagacgttataattggtagtgatacagtcattgaaccaggcgtacgaattaatggccgtacagaaattggcgaagatgttgttattggtcagtactctgaaattaacaatagtacgattgaaaatggtgcatgtattcaacagtctgttgttaatgatgctagcgtaggagcgaatactaaggtcggaccgtttgcgcaattgagaccaggcgcgcaattaggtgcagatgttaaggttggaaattttgtagaaattaaaaaagcagatcttaaagatggtgccaaggtttcacatttaagttatattggtgatgctgtaattggcgaacgtactaatattggttgcggaacgattacagttaactatgatggtgaaaataaatttaaaactatcgtcggcaaagattcatttgtaggttgcaatgttaatttagtagcacctgtaacaattggtgatgctgtattggtggcagctggttccacaatcacagatgacgtaccaaatgacagtttagctgtggcaagagcaagacaaacaacaaaagaaggatataggaaataatcatttacgtatttaaaatggctaggataaaaggataatcctatgtaatattaatgtaatctttatgatttaatgattcgcatagtaatggagttacattttatatataatagtaattgcgtaagtaaataattggaggactataaatgttaaataatgaatataagaattcgtcattaaagattttttcattgaaaggaaacgaagcattagcgcaagaagttgctgaccaagtaggaattgaactaggtaaatgttcagttaaacgttttagtgatggagaaattcaaattaatatcgaagagagtattcgtggttgtgacgtatttattattcaaccaacatcatatcctgtgaatctacatttaatggaattattaattatgattgatgcttgtaaacgtgcttctgcagcaacaatcaatattgtagtgccatattatggatatgcaagacaagatagaaaagcccgtagccgtgagccaatcactgctaaattagttgcaaacttaatcgaaacagctggcgcaactcgtatgattgcgttagacttacatgcaccacaaattcaaggattctttgatattccaattgaccacttaatgggtgtgccaattcttgctaaacatttcaaagatgatccgaatattaacccagaagaatgtgtcgttgtttcaccagaccatggcggtgttacacgtgcacgtaaattagctgacattttaaaaactccaattgcaattatagataaacgtcgtcctagaccaaatgttgctgaagtgatgaacattgttggtgagattgaaggacgtacggcaattattattgacgatataattgatacagcaggtacaatcactttagctgcacaagcattaaaagataaaggtgctaaagaagtatatgcttgttgtacacaccctgttttatcaggaccggctaaagaacgtatcgaaaattctgctataaaagaattaatcgtaacaaactcaattcatttagatgaagatcgcaaaccatctaacactaaagaattatctgttgctggtttaatcgcacaagctatcattcgtgtatacgaaagagaatcagttagcgtattatttgactaatatttaaaaggcgtttgacgaacatattccaaacgtgtataatagtttcgttcgtgattatacgaataaataaacacttgcaagcaacgattatgttgatgggtaagtgaggtgctcgttttgagcaaaaatgaaaggtggaaatgagaatggcttcattaaagtcaatcatccgtcaaggtaaacaaacacgttcagatcttaaacaattaagaaaatctggtaaagtaccagcagtagtatacggttacggtactaaaaacgtgtcagttaaagttgatgaagtagaattcatcaaagttatccgtgaagtaggtcgtaacggtgttatcgaattaggcgttggctctaaaactatcaaagttatggttgcagactaccaattcgatccacttaaaaaccaaattactcacattgacttcttagcaatcaatatgagtgaagaacgtactgttgaagtaccagttcaattagttggtgaagcagtaggcgctaaagaaggcggcgtagttgaacaaccattattcaacttagaagtaactgctactccagacaatattccagaagcaatcgaagtagacattactgaattaaacattaacgacagcttaactgttgctgatgttaaagtaactggcgacttcaaaatcgaaaacgattcagctgaatcagtagtaacagtagttgctccaactgaagaaccaactgaagaagaaatcgaagctatggaaggcgaacaacaaactgaagaaccagaagttgttggcgaaagcaaagaagacgaagaaaaaactgaagagtaattttaatctgttacattaaagtttttatactttgtttaacaagcactgtgcttattttaatataagcatggtgctttttgtgttattataaagcttaattaaactttattgctttgtactaaagttaaattaattttagtgagtaaaagacattaaactcaacaatgatacatcataaaaattttaatgtacttgattttaaaatacatacttactaagctaaagaataatgataattgatggcaatggcggaaaatagatgttgtcattataataataaatgaaacaattatgttggaggtaaacacgcatgaaatgtattgtaggtctaggtaatataggtaaacgttttgaacttacaagacataatatcggctttgaagtcgttgattatattttagagaaaaataatttttcattagataaacaaaagtttaaaggtgcatatacaattgaacgaatgaacggagataaagtgttatttatcgaaccaatgacaatgatgaatttgtcaggtgaagcagttgcaccgattatggattattataatgttaatccagaagatttaattgtcttatatgatgatttagatttagaacaaggacaagttcgcttaagacaaaaaggaagtgcgggcggtcacaatggtatgaaatcaattattaaaatgcttggtacagaccaatttaaacgtattcgtattggtgtgggaagaccaacaaatggtatgacggtacctgattatgttttacaacgcttttcaaatgatgaaatggtaacgatggaaaaagttatcgaacacgcagcacgcgcaattgaaaagtttgttgaaacatcaagatttgaccatgttatgaatgaatttaatggtgaagtgaaataatgacaatattgacaacacttataaaagaagataatcattttcaagaccttaatcaggtatttggacaagcaaacacactagtaactggtctttccccgtcagctaaagtgactatgattgctgaaaaatatgcacaaagtaatcaacagttattattaattaccaataatttataccaagcagataaattagaaacagatttacttcaatttgtagatgctgaagaattgtataagtatcctgtgcaagatattatgaccgaagagttttcaacacaaagccctcaactgatgagtgaacgtattagaactttaactgcgttagctcaaggtaagaaagggttatttatcgttcctttaaatggtttgaaaaagtggttaactcctgttgaaatgtggcaaaatcaccaaatgacattgcgtgttggtgaggatatcgatgtggaccaatttcttaacaaattagttaatatggggtacaagcgggaatccgtggtatcgcatattggtgaattctcattgcgaggaggtattatcgacatctttccgctaattggggaaccaatcagaattgagctatttgataccgaaattgattctattcgggattttgatgttgaaacgcagcgttcaaaagataatattaaagaagtcgatataacaactgcaagtgattatatcattactgaagaagtgattagacatcttaaagaagagttaaaaagtgcatatgaaaatacaagacccaaaatagataaatcagtgcgcaatgatctgaaagaaacgtatgaaagctttaaattattcgaaagtacatactttgatcatcaaatactacgtcgtttagtagcgtttatgtatgaaacaccttcgacaattattgattatttccaaaaagatgcaatcattgcggttgatgaatttaatcgtattaaagaaactgaagaaagtttaacagtagagtctgattcgtttattagcaatattattgaaagtggtaatggatttataggacaaaattttataaaatatgatgattttgaaacattgattgaaggctatcctgtcacttatttttcattattcgctacaacaatgccgataaaactaaatcatattattaaattttcatgtaaacctgtccaacaattttatgggcaatatgatattatgcgttctgaatttcaacgatatgttaatcaaaactatcatatcgtggttttggtcgaaaccgaaactaaagttgaacgtatgcaagcgatgttaagtgaaatgcatattccatcaataacaaaattgcatcgctcaatgtcatcggggcaagcagtgattattgaaggcagtttatctgaaggatttgaactacctgatatgggattagttgtcattactgagcgtgagctttttaaatcaaaacagaaaaagcaacgaaaacgtacgaaagctatctcaaatgctgaaaaaattaagtcttaccaagatttaaatgtgggagattatattgttcatgtgcatcatggtgttggtagatatttaggtgttgagacgctcgaagtagggcaaacacatcgtgattatattaaattgcaatataaaggtacggatcaactatttgttccagtagatcaaatggatcaagttcaaaaatatgtagcttcggaagataagacgccaaaattaaataaactcggtggcagtgaatggaaaaaaacaaaagctaaagttcaacaaagtgttgaagatattgctgaagagttgattgatttatataaagaaagagaaatggcagaaggttatcaatatggggaagacacagctgagcaaacaacatttgaattagattttccatatgaacttacgcctgaccaagcgaaatctatcgatgaaattaaagatgacatgcaaaaatcgcgtccaatggatcgcttgctatgtggtgatgttggttatggtaaaactgaagttgcagtgagagcagcattcaaagctgtaatggaaggaaagcaggttgcatttttagttcctacaactattttagctcaacaacattatgagacgttaattgagcgtatgcaggattttcctgttgaaattcaattaatgagtcgttttagaacgcctaaagagataaaacaaactaaggaaggacttaaaactgggtttgttgacatagtggttggtacacacaaattacttagtaaagatatacagtataaagatttagggctgttgattgtagatgaagaacaacgatttggtgtacgccataaagagcgtattaaaacattaaaacataatgtagatgtactaactttgactgcaactccaatacctagaacattgcatatgagtatgctaggtgtgcgcgatttgtcagtgattgaaacgccgccagaaaatcgtttcccagttcaaacatatgtattagaacagaacatgagttttatcaaagaagctttagaaagagaactatctcgtgatggccaagtattttatctttataataaagtgcaatccatttatgaaaaacgagaacaactccagatgttaatgccagatgctaacattgcagttgctcatggacaaatgacagagcgcgatttagaagaaacgatgttaagttttatcaataatgaatatgatattttagtaacgacgacgattattgaaacaggtgtcgatgtcccaaatgcaaatactttgatcattgaagatgcagatcgctttggattgagtcagttgtatcaattaagaggtcgtgttggtcgttcaagtcgtattggttatgcatacttcttacatccagcaaataaggtactaactgagactgcagaagatcgattacaagcgattaaagaatttacggagttaggctcaggatttaagattgcgatgcgtgatttgaacattcgtggtgctggtaatttgttaggtaaacaacagcacggctttattgatacagttggatttgatttgtacagtcaaatgttagaagaagctgtaaatgaaaaacgtggtattaaggaaccagaatctgaggtgccagaagtcgaagttgatttaaacttggatgcatatttgccaacagaatatattgcaaatgaacaagctaaaattgaaatttataaaaagctacgaaaaactgaaacatttgatcaaattatcgacattaaagatgaattaattgatcgtttcaatgattatcctgttgaagtagcacgtttgcttgatatagtggaaataaaagtacacgcattacattcaggtatcacgttgattaaagataaagggaaaataattgatattcatttatctgtaaaagccactgaaaatattgatggcgaagtgcttttcaaagcaacacaacctttaggtagaacaatgaaggttggtgttcaaaataatgcaatgacaattactttaacgaaacaaaatcaatggcttgatagtttgaagttcttagttaagtgcattgaagaaagtatgagaatcagtgatgaagcataaagaagcatttaatggcgttgtcgtgttaactgctgcattaattgtcattaaaattctgagtgctgtatatcgaattccatatcaaaatatattaggcgatacaggtttgtatgcatatcaacaagtgtatccaattgtagcattaggaatgatattatcgatgaatgccattcctagtgcaattacacaaaatatagggaagtatcatagtgacgaggcatatgcaaaagcggtcgcttatatacaattagttggtatattattatttattgctatttttgtgtttgcgagcaatattgcacatatgatgggtgatagccatttaacacctatgattcaagctgcaagttttagctttatatttataggtatgcttggcgtgttaagaggttattatcaatctgcaaataatatgacagttccggctatttcccaggttatagaacaagttatacgagtaggtattattattgttactattgttgtttttgtagatagaggttggacgatatatgaagcgggaacaattgctattttagcatcaacgataggttttttcggttcttcaatttatttagtagcgcaccgaccttttaagtttaaaatggtaaataacactgcaaagatcgtttggaaacagttcgcactttcggttttgattttcgctatcagtcaattaatcgtaattttatggcaagtgattgatagcgttactattattaagtcacttcaagcgatacgcgtgccattcgatgttgccataaccgaaaaaggagtctatgaccgtggtgcatcatttattcagatgggattgattgtaactacaacatttagttttgcgctcattcctctgttaagtgaggcaatcaaaatgaataatcaggtacttatgaatcgttatgcaaatgcgtcattaaagattacgattttaataagtacagcagcgggaataggattaattaatttattgcctttaatgaacggtgtgttttttaagacgaatgatttaaccttaacgttaagcgtttatatgattacggtcatttgtgtatcattaattatgatggatatggcattattacaagctcaacatgctgtgagacctatttttgttggtatgacggcaggattggttattaaatttatacttaatatcattttgattcgtttaagtggcattattggtgcgagcatgagtactgttgtatcattaattatattcggtacgattatccatattgctgtcacgagaaaataccacttacatgcgatgagacgattttttatcaatgttgttttaggtatggtatttatgtcgatagttgttcaatgcgtgttaaacatagtgacaacacacggtagaatcactggactcattgaattattatgtgcagcagtattaggtatcattgcattgtttttctatatttttagatttaatgttttgacatataaagagttaacttatttaccatttggttcaaagttgtatcaaattaagaaaggaagacgttgatggcacataccattacgattgttggcttaggaaactatggcattgatgatttgccgctagggatatataaatttttaaagacacaagataaagtttatgcaagaacgttagatcatccagttatagaatcattgcaagatgaattaacatttcagagttttgaccatgtttatgaaacacatgaccaatttgaagatgtctataatgatattgtggcgcaattggttgaagctgctaatgaaaaagatattgtctatgcggttccgggtcaccctagagttgctgagacaactacagtgaaattactggctttagcaaaggacaatactgatatagatgtgaaagttttaggtgggaaaagctttattgatgatgtttttgaagcagttaatgtagatccgaatgatggcttcacactgttagatgcgacatcattacaagaagtaacacttaatgttagaacgcatacattgattacgcaagtttatagtgcaatggttgctgctaatttgaaaatcactttaatggaacgatatcctgatgattaccctgttcaaattgtcactggtgcacgaagcgatggtgcggataacgttgtgacatgcccattatatgaattggatcatgatgaaaatgcattcaataatttgacgagtgtattcgtaccaaaaatcacaacaccgacatatttgtatcatgactttgattttgcaacggaagtgattgatactttagttgatgaagataagggttgtccatgggataaagtgcaaacgcatgaaacgcttaaacgttatttacttgaagaaacatttgaattgttcgaagctattgacaatgaagatgattggcatatgattgaagaactaggagatattttattacaagtgttattgcatactagtattggtaaaaaagaagggtatatcgacattaaagaagtgattacaagtcttaatgctaaaatgattcgtagacacccacacatatttggtgatgctaatgctgaaactatcgatgacttaaaagaaatttggtctaaggcgaaagatgctgaaggtaaacagccaagagttaaatttgaaaaagtatttgcagagcattttttaaatttatatgagaagacgaaggataagtcatttgatgaggccgcgttaaagcagtggctagaaaaaggggagagtaatacatgagattagataaatatttaaaagtatcacggttaataaagcgacgtacgctagcaaaagaggtaagtgatcaaggtagaattacaataaatggtaatgttgctaaagctggatcggatgttaaagttgaagatgtgctgactattcgctttggtcaaaaattagtaacagttaaagtaactgcattaaatgaacatgcatctaaagataacgcgaagggcatgtatgaaatcattgaagagcgtcgacttgaagaagcgtaaattggaggtgacaagcaatgaaaaataaagtagaacatatagaaaatcagtacacgtcgcaagagaacaagaaaaaacaacgtcaaaaaatgaaaatgcgtgttgttcgtaggcgtattacagtatttgcgggcgtattacttgcgataattgttgttttatcaatcttgcttgttgtccaaaaacatcgcaatgatattgatgcacaggagcgaaaagcgaaagaagcacagtttcaaaagcaacaaaatgaagaaattgcgttaaaagaaaagttgaataatctgaatgacaaagattacattgaaaaaattgcgcgtgatgattattacttaagcaacaaaggtgaagtgatttttaggttgccagaagacaaagattcgtctagctcaaaatcttcgaaaaaataaatccaaattgattcaaaattatccgagtatagacattgtgaaaaaatccaaacaaggatataataagggaaaatcgaatcaaatcgggaggatttatttaacatatgtcaatcgaagttggaaataagcttaaaggtaaagtcactggtattaaaaagtttggtgcattcgtagaattacctgaaggaaaaagtggtttagttcacattagtgaagtcgcagataattatgttgaaaacgtagaagagcacctttctgttggtgatgaagtagacgtaaaagtattatctattgctgatgatggaaaaattagtctttcaattaagaaagctaaagaccgtccacgtagacaacatacgagtaaaccaagtcatcaaaaaccagtgcaaaaagccgaagattttgaaaagaaattaagcaatttcttaaaagatagtgaagataaattaacttcaatcaaacgtcaaacagaatctagacgcggtggcaaaggttctagacgttaattaaaataaataaagactgtttcgataaggaatatatttagaatgatgcgtatcgaataatcgattgcagcgttagacaatctaagactgtttcttaaataaggagcagtctcttttatttgtaatgatataactaagacttataccatttttgaaaattgtaaaagtgaggtgatgttatgcagttaaatagtaatggttggcatgttgatgaccatattgttgtcgctgtttctacaggtattgatagtatgtgtttattgtatcaactactaaatgattataaagatagttatagaaaactaacatgtttacatgtcaatcatggcgttaggtcagcttcaatcgaggaagccagatttttagaagcatactgcgaacgtcatcacatcgatttacatatcaaaaagttggatttgtcgcatagtctcaatcgaaataacagcattcagaatgaagctcgaattaaacgttacgaatggtttgatgaaatgatgaatgtattagaagcggatgtattgctaacggcgcatcatttggatgatcaattagaaactattatgtatcgcatttttaatgggaaatcaacgcgtaataaactaggatttgatgagttgtcgaagcggaaaggttatcagatttatcgaccacttttagctgtctctaaaaaagaaataaaacaattccaagagagatatcatataccatattttgaagatgaatctaataaagataacaaatatgttagaaatgatattcgtaatagaattattccagctattgatgaaaataatcaacttaaagtatcgcatttattaaaattaaaacaatggcatgatgaacaatatgatattttgcaatattcagctaaacaatttattcaagaatttgtgaagtttgatgaacagtcaaaatatttagaggtttctagacaagcttttaataacttaccaaactcattaaagatggttgtgttggattgcctattatcaaagtattatgagttgtttaatattagtgctaaaacatacgaagagtggtttaaacaatttagtagtaagaaagcacaattcagtattaatctcacggataaatggataattcaaatcgcatatggtaaattaataataatggctaaaaataatggcgatacatattttagagttcaaactattgaaaagccaggtaattatatttttaacaaatatcgattagagatacattctaatttaccaaaatgtttatttccgctttcagtgagaacacgacaaagtggcgatacatttaaactgaatgggcgcgatggttataagaaagtgaatcgtctgtttatagattgtaaagtgcaacagtgggttcgggatcaaatgccaatcgtattggataaacaacagcgcattattgcggtaggagatttatatcaacaacaaacaataaaacaatggattataattagtaaaaatggagatgaatagcgttatgcataatgatttgaaagaagtattgttaactgaagaagatattcaaaatatctgtaaggaattgggagcacaattaacaaaggattatcaaggtaaaccattagtatgcgtgggtatcttaaaaggctcagcaatgtttatgtcagatttaattaaacgaattgatacacatttatcaattgatttcatggatgtttctagttatcacggaggcactgagtcaactggtgaagttcaaatcattaaagatttaggttcttctattgaaaataaagacgtattaattattgaagatatcttagagactggtactacacttaagtcaattactgaattattacaatctagaaaagttaattcattagaaatagttactttattagataaaccaaaccgtcgtaaagcggacattgaagctaagtatgtaggtaaaaaaataccagatgaatttgttgttggttacggtttagattatcgtgaattataccgaaacttaccatatatcggtatgttaaaacctgaagtgtattcaaattaattttttaatcaatttcagttattattactatgcgtttgagaaataatagtgtagactcaaaaatatgaaaaatgtatttcatatatatttaattttagacaagacatatgtcttaaaaagttggaaaatatagagattgataaaactaacacagggtgtgaatgacattgatgttaagctcaattactagcttataaaacatgtcatatgttacaatttttgttagttttattatgggaagtaggaggaaatgacgcatgcagaaagcttttcgcaatgtgctagttatcgtaataataggcgttattatttttggtctattttcatatttaaacggtaatggaaatatgccgaaacagcttacatataatcaatttacagagaagttggaaaaaggtgaccttaaaactttagaaatccaaccacaacaaaatgtctatatggtaagtggtaaaacgaaaaatgatgaagactattcatcaactattttatataacaacgaaaaagaattacaaaaaattactgatgctgctaaaaagcaaaacggtgtaaaattaacgattaaagaagaagaaaaacaaagtgtctttgtgagtatactttcaacattaattccagttgtagtcatagcgttattatttattttcttcctaagccaagcacaaggtggcggtagtggcggtcgtatgatgaactttggtaaatctaaagcaaaaatgtacgataataataaacgtcgtgttcgtttctctgatgtagcaggggcagatgaagaaaaacaagaattaattgaaattgttgatttcttgaaagataataaaaaattcaaagaaatgggatctaggattcctaaaggtgtcttacttgttggacctccaggtactggtaaaacattacttgctagagcggttgcaggtgaagcaggcgcaccattcttctctattagtggttcagactttgtagagatgtttgttggtgttggtgcgagccgtgttcgtgacttattcgataatgctaagaaaaacgcgccttgtatcatctttatcgatgagattgatgctgttggtcgtcaacgtggtgcaggtgttggtggcggtcatgatgaacgtgaacaaaccctaaaccaattattagttgaaatggatggattcggtgaaaatgaaggtatcattatgatagctgctacaaaccgtcctgatatccttgacccagccttattacgtccaggtcgttttgatagacaaattcaagttggtcgtccagatgtgaaaggccgtgaagcaattcttcatgttcatgctaaaaataaaccacttgatgaaacggttgatttaaaagcaatttcacaacgtacacctggtttctcaggtgctgatttagagaacttattaaatgaagcatctttaattgctgtacgtgaaggtaaaaagaaaattgacatgagagatatcgaagaggcaacggatagagttatagctggacctgctaagaaatctcgagttatttctaagaaagaacgtaatattgttgctcatcacgaagctggtcatacaattatcggtatggtacttgatgaggcagaagtagtgcataaagttactattgttccacgtggacaagcaggtggttatgcaatgatgctacctaaacaagatcgtttcttaatgactgaacaagagttattagataaaatctgtggtttacttggtggacgtgtatcagaagatattaactttaacgaagtatcaacaggtgcttcaaatgacttcgaacgtgcaacacaaatcgcacgctcaatggttacgcaatatggtatgagtaaaaaattaggaccattacagttcggtcatagcaatggtcaagtattcttaggcaaagatatgcaaggtgagcctaattattcaagccaaatcgcatatgaaattgataaagaagttcaacgaatcgttaaagaacaatacgaacgttgtaaacaaattttattagagcacaaagaacaattaattttaattgctgaaacattattaacagaagaaacattagttgctgaacaaattcaatcattattctacgaaggtaaattacctgaaattgattatgatgcagctaaagttgttaaagatgaagattctgaatttaatgatggtaaattcggtaaatcttatgaagagattcgtaaagagcaattagaagatggacaacgtgacgaaagtgaagatcgtaaagaagaaaaagatattgctgaggataaaaaagaagctgataaatctgatgaaaaagatgaaccagcacatcgacaagccccaaatatcgaaaaaccttacgatccaaataacccagacaataaataatcgattatattcagtacctctttctatgataaagttatagaaagaggtacttttatgatttaaggaatacgagcctgagacataaatcaatgttcaatgctctacaaagttgtattggcagtagttgactgaacgaaaatgcgcttgtaacaagcttttttcaattctagtcggggccccaaacaaagagaaattggattcccaatttctacaggcaatgcgagttggggtgtgggccccaactcagaagctgaccaaaagtcagcttacgataatgtgcaagttggggtgtgggccccaacatagaagctgtcggaaagtcagcatacaataatgtgcaagttggcggggccccaacacagagaatttcgaaatgaaattctacagacaatgcaagttggggtgggggccccaacacagaggatttcgaaaagaaattctacagacaatgcaagttggggtgggacgacgaaataaattctttgaaaatatcatttctctcccactcccattatggcacgaataattaataatcaaacaagttgcttcattatttagaatgatgggtgtagaataagtacaattgttgcattttatgaagtaaagtaatttttaaaatatagagtaatagaggagattgaaataatgacacacgattatattgttaaagcattagcatttgatggggagattagggcttatgctgctttgacaactgaaactgttcaagaagcacaaacgagacattatacatggccgacagcatctgctgcaatgggaagaacaatgacagcaacagctatgatgggcgcaatgttgaaaggtgatcaaaaattaactgtcactgtagatggccaaggacctattggacgaattattgccgatgcaaatgctaaaggcgaggtgcgtgcttatgtagaccatccacaaactcattttccattaaatgagcaaggtaaacttgatgtaagacgagcagtagggacaaatggatctattatggttgttaaagacgttggaatgaaagactatttctctggagcaagtccaattgtttcaggagaacttggtgaagattttacttattattatgctacaagtgaacaaacaccttcatcggtaggtcttggtgtattggtaaatcctgataatacgattaaagcagcaggaggatttatcattcaagttatgccaggtgccaaagatgaaacaatttcaaaattagaaaaagcaattagtgaaatgacgccagtttctaaattaattgaacaaggattaacgccagaaggattactaaacgaaatcttaggtgaagaccatgtgcaaattttagagaaaatgcctgttcaatttgaatgtaattgtagtcatgagaaatttttaaatgctattaaaggattgggcgaggctgagattcaaaatatgattaaagaagatcatggtgctgaagcagtatgtcatttctgtggaaataaatataaatatactgaagaagaattaaacgtgttgctagaaagtttagcgtaatttaatttaaatcaatacgctaaaatgtttatttttagcggtttagtgaaatgtagaactaaatagttgtataatccttattgattttgtttgctttctagaatttatttgataaaataattctatatccgataaataaactaagatttcaacaactaactaaaaaggagtgttcttaatggcacaaaaaccagtagataatattactcaaattattggcggtacaccggtagtcaaattgagaaatgtagtagatgacaatgcagcagatgtttatgtaaaattggaatatcaaaatccaggtggttctgtaaaggatagaattgctttagcaatgattgaaaaagcagagcgagaaggtaaaattaaacctggcgatacaattgtagaaccaacaagtggtaatacaggtatcggtttagcatttgtatgtgctgctaaaggatataaagcagtatttactatgcctgaaacaatgagccaagagcgtcgtaatttattaaaagcatacggtgcggaattagttttaacgcctggatcagaagcgatgaaaggtgcaattaaaaaagctaaagaattaaaagaagaacatggttacttcgagccacaacaatttgaaaaccctgcgaaccctgaagttcatgagttaactacaggtcctgagttattacaacaatttgaagggaaaactatcgatgcgttcctagctggtgttggtactggtggtacgttatctggtgtaggtaaagttctgaaaaaagaatatcctaacatcgaaattgttgctatagagcctgaggcttctccagtattgagcggtggtgagccaggtccacataaattacaaggtttaggtgctggatttattccaggtactttgaatacagaaatctatgacagtattattaaagtaggaaatgatacagcgatggaaatgtctcgtcgagttgctaaagaggaaggtattttagcaggtatttcatcaggtgctgcgatttatgctgccattcaaaaagcaaaagaattaggaaaaggtaaaacagtagtaacagtattgccgagtaatggtgagcgctacttatcaacacctttatattcattcgatgactaattaaagtcatttaaaagagtgagttatctttttgagataacttgctctttttttctaccatgtataattttaaaaatatgagcgttaaattaaacatttttctgataaaaacatccagtgaatgataagataataaacgtacatactaataactagtaaatcgcagaagtaaattttattagagttaaacaatacataattaaagggtggttaacatgactaaaacaaaaattatgggcatattaaacgtcacacctgattcattctcagatggtggaaaatttaataatgttgaatcagcagtaactagagtgaaagcgatgatggatgaaggtgctgacattatagatgttggaggtgtttcaacgagacccggccatgaaatgatttcattagaagaagagctgaacagagtattacctgttgttgaagctattgtcggttttgatgtaaaaatttcggttgatacttttcgtagtgaagttgctgaagcttgtttaaagctaggtgttgatattattaatgatcaatgggcaggcctttatgatcatcgcatgtttcaagttgtagccaaatacgatgcggaaattgttttaatgcataatggcaatggtaatcgtgatgaaccggttgtcgaagaaatgttaacatctttgttagcacaagcacatcaagctaaaatagctggtataccttcaaataaaatttggctagatccaggtataggtttcgctaaaactagaaatgaagaagccgaagttatggcaagactggatgaacttgttgcaacagaatatccagttttattagcgactagccggaaacgtttcactaaagagatgatgggttatgatacaacaccggttgaaagagatgaagtaactgcagctacgactgcatatggtattatgaaaggcgttagagcggtacgcgttcataatgtcgagttgaatgctaaattagctaaaggtatagattttttaaaggagaatgaaaatgcaagacacaatctttcttaaaggtatgcgcttttatggatatcatggtgctttatcagctgaaaatgaaatagggcaaattttcaaagtggatgtaactttgaaagtagacttagctgaagctggtcgtactgataatgttattgatacagttcattatggtgaagtgttcgaagaggttaaatcaattatggaaggtaaggccgttaatttacttgagcatctagctgaacgtattgcaaatcgtataaattcacaatataatcgtgtaatggaaacgaaagtgagaattactaaagaaaacccaccgattccgggtcattatgatggagtaggtatcgaaatagtgagggagaataaatgattcaagcatacttagggttaggtagtaatattggcgatagagaaagccagttaaacgatgctataaagattttgaatgaatatgatggtattaatgtatttaatatttctccgatttatgaaacagcaccagttgggtatactgagcaacctaactttttaaatttgtgtgttgaaattcaaacaacactcacagtattacaactgttggaatgttgtttgaagacagaagaatgtttacaccgtgttagaaaggaacgatggggtcctagaactttagatgtggatattttgttgtatggagaagaaatgatagatctaccaaaactgtcggtgccacatccgagaatgaatgaacgtgcatttgttttaatcccattaaatgatatagcagcaaatgtcatagaaccacgttcgaaattgaaagtgaaagatttagtttttgtcgatgacagtgtaaagagatataaataatgtattgttgagaacattcatatttattgggaatagatgattgattattggagatgtttccgcattttgattatctctaaatgcatttgatttcgaattagtatatgatgatttagtatgtgttagaattaagttatttcataaaatcaaagtaagcaatatttgataaattgctgtaatttatttggggttttgttgaagtttgtggaagataatttttatacatttacttagggttgtattaatgataatcgtattttaaatgaataagtaattcataaacgaaaacagaaattgctttattacatttacaacctcttgtaaaattaaaaaagtgataaaattgatgttatgaatataagaaaacatgccacatcataactttaaggtgtaatggttaatgataaagtattagaagcatcgaaagagatgtatgttgagcaaaaatgtctgatattttataaaactttaaaggaaaatgtttgagtgtaccagttggaatactaaaggattacaacaagttaaaggagagaaagttatgtcagaagaaatgaatgaccaaatgttggttcgacgtcaaaaattacaagaattatatgatcttggtatagacccgtttggttctaaatttgaccgttcaggtttatctagtgatttgaaagaagattgggaccagtattctaaagaagaattggtagaaaaagaagcggatagtcatgtcgctatagctggacgattaatgactaagcgtggtaaaggtaaagcaggatttgcacacgttcaggacttagctggacaaattcaaatttacgttcgtaaagatcaagttggcgatgacgaatttgatttatggaaaaatgctgatttaggcgatatcgttggtgttgaaggtgtaatgttcaaaacaaatactggcgaattatcggttaaagcgaagaaattcacgctactaactaaatcattgcgaccattaccggataaattccacggtttacaggatattgaacagagatatcgtcaaagatatttagatttaattacgaacgaagatagcactcgtacatttattaatcgtagtaaaatcattcaagaaatgcgtaattatttaaataataaaggtttcttggaagtagaaacacctatgatgcaccaaattgctggtggcgcagctgctagaccatttgtaacacatcataatgcattagatgcaacgttatacatgcgtattgctattgagttgcatttgaaacgtttaattgtcggtggacttgaaaaagtatatgaaattggtagagtattccgtaatgaaggtgtatcaactagacataaccctgaattcacaatgattgaattatatgaagcatatgcagattatcatgacattatggatttaacagaatctatggtgagacatattgccaatgaagtattaggttctgcaaaagtacaatataatggggaaacgattgatttagaatctgcatggactcgtttgcatattgttgatgctgtaaaagaagctactggtgtagatttttatgaagttaaaagtgatgaagaagctaaagctttagctaaagaacatggtattgaaattaaagatacaatgaaatatggtcatattttaaatgaattctttgagcaaaaagttgaagaaacacttattcagccaacgtttatctatggtcatccgactgaaatttcacctttagcgaagaaaaatcctgaagatcctagatttactgatcgtttcgaattgttcattgtaggtagagagcatgcaaatgcatttactgaattaaatgatcctattgatcaaaaaggtcgttttgaagcgcaacttgttgaaaaagcacaaggtaatgatgaagcgcatgaaatggatgaagattacattgaagcgttagaatatggtatgcctccgacaggtggtcttggtatcgggattgacagattagttatgttattaactgactctccatcaatcagagacgtattattattcccttatatgagacaaaaataaatgacgttgattgttagtaagagctctcgtgtatacaacatgtgtatgcgagggttttcttaattatggtaattagttcgtgtttgaatgtttttaatagcaatagttaacgataatggtgctatttttgactgttaaacaaggtagttagctgatagatgaaaatgacgatacgtatatagagtagttctgatgagaaatgttaacgatagacattgagatatcttataacaaaaattgctatattagtataatttatcttaatcagctataaaagtactttaaaattgtatagaatgtgtatggttttgtacatatgtgtatgatagaatactaaaagtgttatgaattagagagcacgagaaatgtcagttttgaagaataaaaaagttgattaaaagtgttgactttatcaattgaatgaagtaatatataaaagtcgtcaaaaacagacgaaacacactaaaagctgatgtgacaaagttcacaacaaagtgtaaaattaactattgcgccttattaattaagtgtgtatcataaataagtaagttattttgtctggtgactatagcaaggaggtcacacctgttcccatgccgaacacagaagttaagctccttagcgtcgatggtagtcgaacttacgttccgctagagtagaacgttgccaggcaaatgacaaatcggagaattagctcagctgggagagcatctgccttacaagcagagggtcggcggttcgaacccgtcattctccaccatttattcttacatatagccggcctagctcaattggtagagcaactgacttgtaatcagtaggttgggggttcaagtcctctggccggcaccatcttttgagccattagctcagctggtagagcatctgacttttaatcagagggtcagaggttcgaatcctctatggctcattacgatttaatttttatatttagcaaaataatgcagaagtagttcagcggtagaatacaaccttgccaaggttggggtcgcgggttcgaatcccgtcttctgctccattattttgccggggtggcggaactggcagacgcacaggacttaaaatcctgcggtgagagatcaccgtaccggttcgattccggtcctcggcaccattttagcgcccgtagctcaattggatagagcgtttgactacggatcaagaggttatgggttcgactcctatcgggcgcgccatttttaaattaattgaataacgggaagtagctcagcttggtagagcacttggtttgggaccaaggggtcgcaggttcgaatcctgtcttcccgattacttcttaaatttcattttatgggggcttagctcagctgggagagcgcctgctttgcacgcaggaggtcagcggttcgatcccgctagtctccaccatttatttttacacgatgaacattgaaaactgaatgacaatatgtcaacgttaattccaaaaaaacgtaactataagttacaaacattatttagtatttatgagctaatcaaacatcataatttttatggagagtttgatcctggctcaggatgaacgctggcggcgtgcctaatacatgcaagtcgagcgaacggacgagaagcttgcttctctgatgttagcggcggacgggtgagtaacacgtggataacctacctataagactgggataacttcgggaaaccggagctaataccggataatattttgaaccgcatggttcaaaagtgaaagacggtcttgctgtcacttatagatggatccgcgctgcattagctagttggtaaggtaacggcttaccaaggcaacgatgcatagccgacctgagagggtgatcggccacactggaactgagacacggtccagactcctacgggaggcagcagtagggaatcttccgcaatgggcgaaagcctgacggagcaacgccgcgtgagtgatgaaggtcttcggatcgtaaaactctgttattagggaagaacatatgtgtaagtaactgtgcacatcttgacggtacctaatcagaaagccacggctaactacgtgccagcagccgcggtaatacgtaggtggcaagcgttatccggaattattgggcgtaaagcgcgcgtaggcggttttttaagtctgatgtgaaagcccacggctcaaccgtggagggtcattggaaactggaaaacttgagtgcagaagaggaaagtggaattccatgtgtagcggtgaaatgcgcagagatatggaggaacaccagtggcgaaggcgactttctggtctgtaactgacgctgatgtgcgaaagcgtggggatcaaacaggattagataccctggtagtccacgccgtaaacgatgagtgctaagtgttagggggtttccgccccttagtgctgcagctaacgcattaagcactccgcctggggagtacgaccgcaaggttgaaactcaaaggaattgacggggacccgcacaagcggtggagcatgtggtttaattcgaagcaacgcgaagaaccttaccaaatcttgacatcctttgacaactctagagatagagccttccccttcgggggacaaagtgacaggtggtgcatggttgtcgtcagctcgtgtcgtgagatgttgggttaagtcccgcaacgagcgcaacccttaagcttagttgccatcattaagttgggcactctaagttgactgccggtgacaaaccggaggaaggtggggatgacgtcaaatcatcatgccccttatgatttgggctacacacgtgctacaatggacaatacaaagggcagcgaaaccgcgaggtcaagcaaatcccataaagttgttctcagttcggattgtagtctgcaactcgactacatgaagctggaatcgctagtaatcgtagatcagcatgctacggtgaatacgttcccgggtcttgtacacaccgcccgtcacaccacgagagtttgtaacacccgaagccggtggagtaaccttttaggagctagccgtcgaaggtgggacaaatgattggggtgaagtcgtaacaaggtagccgtatcggaaggtgcggctggatcacctcctttctaaggatatattcggaacatcttcttcagaagatgcggaataacgtgacatattgtattcagttttgaatgtttatttaacattcaaatattttttggttaaagcgatattgcttatgcgagcgcttgacaatctattctttttaaagaaagcggttgtcagacaatgcattgagaaaaattaaagcggagtttactattgtaaatgagcatttgattttttgaaaataaagcagtatgcgagcgcttgactaaaaagaaattgtacattgaaaactagataagtaagtaaaatatagattttaccaagcaaaaccgagtgaataaagagttttaaataagcttgaattcataagaaataatcgctagtgttcgaaagaacactcacaagattaataacgcgtttcctgtaggatggaaacatagattaagttattaagggcgcacggtggatgccttggcactagaagccgatgaaggacgttactaacgacgatatgctttggggagctgtaagtaagctttgatccagagatttccgaatggggaaacccagcatgagttatgtcatgttatcgatatgtgaatacatagcatatcagaaggcacacccggagaactgaaacatcttagtacccggaggaagagaaagaaaattcgattcccttagtagcggcgagcgaaacgggaagagcccaaaccaacaagcttgcttgttggggttgtaggacactctatacggagttacaaaggacgacattagacgaatcatctggaaagatgaatcaaagaaggtaataatcctgtagtcgaaaatgttgtctctcttgagtggatcctgagtacgacggagcacgtgaaattccgtcggaatctgggaggaccatctcctaaggctaaatactctctagtgaccgatagtgaaccagtaccgtgagggaaaggtgaaaagcaccccggaaggggagtgaaatagaacctgaaaccgtgtgcttacaagtagtcagagcccgttaatgggtgatggcgtgccttttgtagaatgaaccggcgagttacgatttgatgcaaggttaagcagtaaatgtggagccgtagcgaaagcgagtctgaatagggcgtttagtatttggtcgtagacccgaaaccaggtgatctacccttggtcaggttgaagttcaggtaacactgaatggaggaccgaaccgacttacgttgaaaagtgagcggatgaactgagggtagcggagaaattccaatcgaacctggagatagctggttctctccgaaatagctttagggctagcctcaagtgatgattattggaggtagagcactgtttggacgaggggcccctctcgggttaccgaattcagacaaactccgaatgccaattaatttaacttgggagtcagaacatgggtgataaggtccgtgttcgaaagggaaacagcccagaccaccagctaaggtcccaaaatatatgttaagtggaaaaggatgtggcgttgcccagacaactaggatgttggcttagaagcagccatcatttaaagagtgcgtaatagctcactagtcgagtgacactgcgccgaaaatgtaccggggctaaacatattaccgaagctgtggattgtcctttggacaatggtaggagagcgttctaagggcgttgaagcatgatcgtaaggacatgtggagcgcttagaagtgagaatgccggtgtgagtagcgaaagacgggtgagaatcccgtccaccgattgactaaggtttccagaggaaggctcgtccgctctgggttagtcgggtcctaagctgaggccgacaggcgtaggcgatggataacaggttgatattcctgtaccacctataatcgttttaatcgatggggggacgcagtaggataggcgaagcgtgcgattggattgcacgtctaagcagtaaggctgagtattaggcaaatccggtactcgttaaggctgagctgtgatggggagaagacattgtgtcttcgagtcgttgatttcacactgccgagaaaagcctctagatagaaaataggtgcccgtaccgcaaaccgacacaggtagtcaagatgagaattctaaggtgagcgagcgaactctcgttaaggaactcggcaaaatgaccccgtaacttcgggagaaggggtgctctttagggttaacgcccagaagagccgcagtgaataggcccaagcgactgtttatcaaaaacacaggtctctgctaaaccgtaaggtgatgtataggggctgacgcctgcccggtgctggaaggttaagaggagtggttagcttctgcgaagctacgaatcgaagccccagtaaacggcggccgtaactataacggtcctaaggtagcgaaattccttgtcgggtaagttccgacccgcacgaaaggcgtaacgatttgggcactgtctcaacgagagactcggtgaaatcatagtacctgtgaagatgcaggttacccgcgacaggacggaaagaccccgtggagctttactgtagcctgatattgaaattcggcacagcttgtacaggataggtaggagcctttgaaacgtgagcgctagcttacgtggaggcgctggtgggatactaccctagctgtgttggctttctaacccgcaccacttatcgtggtgggagacagtgtcaggcgggcagtttgactggggcggtcgcctcctaaaaggtaacggaggcgctcaaaggttccctcagaatggttggaaatcattcatagagtgtaaaggcataagggagcttgactgcgagacctacaagtcgagcagggtcgaaagacggacttagtgatccggtggttccgcatggaagggccatcgctcaacggataaaagctaccccggggataacaggcttatctcccccaagagttcacatcgacggggaggtttggcacctcgatgtcggctcatcgcatcctggggctgtagtcggtcccaagggttgggctgttcgcccattaaagcggtacgcgagctgggttcagaacgtcgtgagacagttcggtccctatccgtcgtgggcgtaggaaatttgagaggagctgtccttagtacgagaggaccgggatggacatacctctggtgtaccagttgtcgtgccaacggcatagctgggtagctatgtgtggacgggataagtgctgaaagcatctaagcatgaagcccccctcaagatgagatttcccaacttcggttataagatccctcaaagatgatgaggttaataggttcgaggtggaagcatggtgacatgtggagctgacgaatactaatcgatcgaagacttaatcaaaataaatgttttgcgaagcaaaattacttttacttactatctagttttgaatgtataaattacattcatatgtctggtgactatagcaaggaggtcacacctgttcccatgccgaacacagaagttaagctccttagcgtcgatggtagtcgaacttacgttccgctagagtagaacgttgccaggcaagttgagaccgtaaggtctcttttttttatgtctaaaacgtcaaaataagagttaacacaaagaaaaatggcttggcgaagtgaaaacgtttgaatctgacgaaacgagaaaagagcgcaacgagtttagtagagctaaatgagtaagcgagagccgaaggagaggaaagaagcaagcgattgtcacaagtcaagaaaggtctttagcgacgatggtagccaacttacgttccgctagagtagaacgttgccaggcaaaaatggatgcgatgagccgcattgagttttggaaatgataatttaataatgtgaactttcgattgtctaagtatgtacatttttaattttgtgtttatacaaatctaaaatgatatcatccaaaacaaaatattgtataaatagagaagagcagtaagacagtatctaatcgaaaatgatcttactgctcttttatatactttattgaaatacaaaaaggaaattaattattatacaatagacaagctattgcataagtaacactaacttttatcaaagaagtgttactttataattaatgattttattagagcgtctacatgcggttttaaagcatcatcgtctataccgccaaagcctaatataaatttaggggttttcttatagtcttggtcatcatcaaaattataaacttgtaattttaactttactttatttgctctatcaagacactcttgtaatgttaatccgttttttactgtaattgtaaaatgcatacctgtttcagcaccttgaatatcaagctgctcattgtaaggcttcaatctatttaaaatataggttagttttctacgataaattcgtctcattttatttaaatgcctttcaaaaccaccggaagatataaacattgcaataaggttttgcatatgaacaggtacagtgttgccttcaatgtgattttgagaatgatattttttcattatagaatagggtaacaccatatatgcaacacgacagctaggaaaaatagactttgaaaatgtactgatataaatcactttttctcctcttgaatatagaccttgaattgctggaatgggtttaccgaaatatctaaactcggaatcataatcatcttctataataaatcgttcttctttttcttgagcccattgtattaattgagttcgcttttttaagtccattacatatccagttggaaattgatgggaaggcgttatatatactatatttttttgtgatttaataacttcatctacgtttattccattatcttcaacttcaatttgttcatattcaacttgttttttatctaaaatatttttgattggtggataactaggtttttcgataataaacgttgaagtataaagtaaatcgactaattgatttactaattgttcggtagatgagccaattataatttgattaggatcacaaattacgccacgattagtaaataaataaaatgccagttgaaaccgcaaatgtaattctccttgaaaatggcctctaagtaatttatttgaatgggttttatcataaagatcttttgaatactttctgaaaagttctattgggaaatgcttcgtgtctatttcatctaaattaaaagcgtaatcataagtttcatcactagtttttggtttatatgaatcatcatcaaaaagagaatggataggttgagtatttaaaatggttaaagattcaatttcagatacataataaccagagcgaggtctcgaatatatgtatccctcgtctaataatagttgataagcatgctctactgttgtttggctaatagataaatgtttgcttaattgtctctttgaataaaacttatcaccttcttgaaattgaccttcaattatttgtttttttaatttttcataaagttgatggtataaagtgtttttcatttttaaaactgacctcctaattttatattattttgcacctttttaaatatcagtttatacattacaatgaatttaatcaacttgaaaaggggttttatataaaatgagtaaaataattggatcagacagagtcaaaagaggtatggccgaaatgcaaaaaggcggcgttatcatggatgtcgttaatgctgagcaagcaagaattgcggaagaagcaggtgcggtagcagtcatggctttagagcgtgtaccttctgatattagagcagctggtggcgttgcacgtatggcaaatcctaaaattgtagaagaagtaatgaatgctgtttcaattcctgtaatggctaaagcacgtattggtcatattacagaagcaagagtattagaagctatgggtgttgactatattgatgaatcagaagtattaacaccagcagatgaggaatatcacttaagaaaagatcaatttacagtgccatttgtatgtggttgtcgtaatttaggtgaagctgcacgaagaatcggtgaaggtgctgctatgttacgtactaaaggtgaaccaggtacaggtaatattgttgaagctgtaagacatatgagacaagttaattctgaagttagtcgattgactgtaatgaatgatgatgagattatgacttttgcgaaagatatcggtgcgccttatgaaattttaaaacaaattaaagacaatggtcgtttaccggtagttaactttgcagcaggtggcgttgcgactcctcaagatgctgctttaatgatggaattaggtgccgacggtgtattcgttggatcaggtatttttaaatcagaagatccagaaaaatttgctaaagcaattgttcaagcaacaacacattaccaagactatgaactaattggaagattagcaagtgaacttggcactgctatgaaaggtttagatatcaatcaattatcattagaagaacgtatgcaagagcgtggttggtaagatatgaaaataggtgtattagcattacaaggtgcagtacgtgaacatattagacatattgaattaagtggtcatgaaggtattgcagttaaaaaagttgaacaattagaagaaatcgagggcttaatattacctggtggcgagtctacaacgttacgtcgattaatgaatttatatggatttaaagaggctttacaaaattcaactttacctatgtttggtacatgcgcaggattaatagttctagcgcaagatatagttggtgaagaaggataccttaacaagttgaatattactgtacaacgaaactcattcggtagacaagttgacagctttgaaacagaattagatattaaaggtatcgctacagatattgaaggtgtctttataagagcgccacatattgaaaaagtaggtcaaggcgtagatatcctatgtaaggttaatgagaaaattgtagctgtccagcaaggtaaatatttaggcgtatcattccatcctgaattaacagatgactatagagtaactgattactttattaatcatattgtaaaaaaagcatagcttaatgtatgctaaatcaacgaattattgatatttatagatttgttgagaagaaaatacctccttcaaacttagctttggaggagttgatttttatgtcaaaattaaaaatgataaaaaataaagatatacataagaaaaaaacccttcaaagagactgagaatagtcaaaattttgaaggggttaattcgatgttgatgtatttgttaaataaagaatccagcgattgcagctgaaatgaaagatactagtgttgcaccgaataataatttcaaaccaaagcgggcaactgtatctccttttttgtcattaagtgatttaatcgcacctgaaataataccaatagagctaaagttagcaaatgatactaagaatacagatgtaacaccttttgcgtgttcagataaatcactaagtttaccaagtgcttgcattgctacaaattcgttagataatagttttgtcgccataactgaaccggcttgaactgcatcttgccatggcacacctactaagaatgcaaatggtgcaaagacaaaaccaattaatgtttggaagtcccaagaaatagcgccacctgaaactgtactaaagatattgcttacaattccatttaatagagcgataatggcaatgtatccgattaacattgcgcctacaatgacagctactttaaatccatctaaaatatattctcctagcatttcgaagaatgattgttgtctttcttcagtttcttcaactaataatttgtcatcttcttcattaactttataagggttaataattgaagcgatgatgaaaccaccaaataagtttaagacaacagccgttacaacatatttaggttcaattaaggtaaagtatgcaccgataattgaagcagatacagtcgacattgctgaagctgttaatgtgtataaacgttgcttaggtatgtatggtaattgttttttaattgaaataaatacttcagattgtcccaaaattgctgcagcaactgcattgtatgattctaaacgtcccataccattaattttagaaattaagaatcctaaaacattaatgattaaaggtaaaatctttgtgtattgaaggataccgataatcgctgaaataaatacgataggtaataatacactgaagaagaatggtggttgcttaggatcgatatattgaataccaccgaatacaaagttaacaccatctgcagcttttaataataagtagttaaaaccgtttgaaataccaccaataaccttgattcccattgtagttttaagcaagataaatgcaaagataagctgaattgcaagtaaaattcctacatatttccagcgaatatttttcctgtctgagctaaatagaaacgcaagtgctaaaaagaagataattccgataatcccaattagaatatgcatatatttctcattcctttagttttttctacaatctatcatacaataaaatggaagggctaacatcataaatttttgaaaatataaaaacaaattaattgaaaaaggtcaaaataggtcatataatatagtcaaagaaggtcaaaaaggggtgatatacatgcacaatatgtctgacatcatagaacaatacatcaaacgtttatttgaagagtcgaatgaggatgtcgttgaaattcagagagcgaatatcgcgcagcgttttgattgcgtaccatcacaattaaactatgtaatcaaaacacgattcactaatgaacatggttatgaaatcgaaagtaaacgtggtggtggtggttacatccgaatcactaaaattgaaaataaagatgcaacaggttatattaatcatttgcttcagttgattggaccttctatttctcaacaacaagcttactatattattgatgggcttttagataaaatgttaataaatgaacgtgaagctaaaatgattcaagcagttattgatagagaaacgctatcaatggatatggtttctagagatattattagagcaaatattttaaaacgtttgttaccagttataaattattactaaatgaaatgaggtgttgaagtgctttgtgaaaattgtcaacttaatgaagcggaattaaaagttaaagttacaagtaaaaataaaacagaagaaaaaatggtgtgtcaaacttgtgctgaggggcaccatccgtggaatcaagctaatgaacaacctgaatatcaagaacatcaagataatttcgaagaagcatttgttgttaagcaaattttacaacatttagctacgaaacatggcattaattttcaagaagtagcgtttaaagaagaaaaacgttgcccatcatgtcatatgactttgaaagatattgcacatgttggtaaatttgggtgtgctaattgttatgcaacatttaaagatgacatcattgatatcgtccgcagagttcaaggtggacaatttgagcacgttggaaagacaccacattcttcacataaaaagatagctttaaagagaaaaatcgaagaaaagaatgaatatttgaaaaaacttattgaaatccaagattttgaggaagcagccattgttagagatgaaattaaagcactaaaagctgagagtgaggtgcaacatgatgacgcataatattcatgataatatcagccaatggatgaaaagtaatgaagaaacacccattgttatgtcttctagaattcggttagcgcgtaatttagaaaatcatgtgcatccactaatgtatgctactgaaaatgatggatttagagttataaatgaggtacaagatgccttgccaaattttgaattaatgcgtcttgatcaaatggatcaacaaagtaaaatgaaaatggttgcaaagcatttgattagtcctgaactaataaaacaaccagcagccgcagtattagtgaatgatgatgaatctttaagtgtcatgataaatgaagaggatcatattcgtattcaagctatgggaactgacacgacattacaggctttatataatcaagcttcatcaattgatgatgaattagatcgaagccttgatataagttatgatgaacaacttggttatttaactacatgtcctaccaatataggtactggtatgagagcaagcgtgatgctacatttaccaggtctatctattatgaaaagaatgacacggattgctcaaaccattaatcgttttggatatacaatcagaggtatttacggtgaaggttcgcaagtttatggacatacttatcaagtatccaaccaacttacacttggtaaatctgagttagaaatcatagaaacattaacagaagttgttaatcaaatcattcatgaagaaaaacaaatacgacaaaagttagacacttataatcaattagaaacacaagaccgtgtttttcgctcgctaggtattttacaaaactgtagaatgataactatggaagaggcttcttatagattaagcgaagttaaacttggtatagatttaaattacattgaattacaaaactttaaatttaatgaattgatggtagctatacagtcaccatttttattagatgaagaagatgacaaatctgtaaaagaaaaacgagcagatatactaagagaacatataaagtaggaggtcattatttatgttatttggtagattaactgaacgtgcacagcgcgtattagcacatgcacaagaagaagcaattcgtttaaatcattcaaatataggaacagaacacctattattggggttaatgaaagaacctgaaggaattgctgcaaaagtattagaaagttttaatatcactgaagataaagtaattgaagaagttgaaaaattaattggacatggtcaagatcatgttggtacattgcattatacacctagagctaaaaaagtcattgaattatcgatggatgaagctagaaaattacatcacaattttgttggaacggaacatattttattaggcttgattcgtgaaaatgaaggtgttgcagcaagagtttttgcaaatctagatttaaatattactaaagcacgtgcacaagttgtgaaagctttaggaaaccctgaaatgagtaataaaaatgcacaagctagtaagtcaaataatactccaactttagatagtttagctcgtgacttaacagtcattgccaaagacggtacattagatcctgttataggacgtgataaagaaattacacgtgtaattgaagtattaagtagacgtacgaaaaataatcctgtgcttattggagagccaggtgttggtaaaactgctattgctgaaggtttagcgcaagccatagtgaataatgaggtgccagagacattaaaagataagcgtgttatgtctttagatatgggaacagtagttgcaggtactaaatatcgtggtgaatttgaagagcgtctgaaaaaggttatggaagaaatccaacaagcaggtaatgtcatcctatttattgatgagttgcatactttagttggtgctggtggtgctgaaggtgctatcgatgcttcgaatattttgaaaccggcattagcacgtggtgaattacaatgtattggtgctactacattagatgaatatcgcaaaaatattgaaaaagacgcggctttagaacgtcgtttccaacctgtacaagttgatgaaccttcagtagtagatacagttgctattttaaaaggattaagagatcgttacgaagcacaccatcgtattaatatttcagacgaagctattgaagcagctgttaaattaagtaacagatacgtttcagatcgtttcttaccagataaagcaattgatttaattgatgaagcaagttctaaagtaagacttaagagtcatacgacacctaataatttaaaagaaattgaacaagaaattgaaaaagttaaaaatgaaaaagatgccgcagtacatgctcaagagtttgaaaatgctgctaatctgcgtgataaacaaacaaaacttgaaaagcaatatgaagaagctaaaaatgaatggaagaacgcacaaaatggcatgtcaacttcattgtcagaagaagatattgctgaagtcattgcaggatggacaggtatcccattaactaaaatcaatgaaacagaatctgaaaaacttcttagtctagaagatacattacatgagagagttattgggcaaaaagatgctgttaattcaatcagtaaagcggttagacgtgcccgtgcagggttaaaagatcctaaacgaccaattggtagctttatcttccttggaccaactggtgttggtaaaactgaattagctagagctttagctgaatcaatgttcggcgatgatgatgcgatgatccgtgtagacatgagtgaatttatggaaaaacacgcagtgagccgattagttggtgctcctccaggatatgttggtcatgatgatggtggacaattaactgaaaaagttagacgtaaaccatattctgtaattttatttgatgaaattgaaaaagcacatccagatgtatttaatattctattacaagttttagatgacggacatttgacagatacaaaaggacgtacagttgatttcagaaatacaattatcataatgacatcaaacgttggagcacaagaattacaagatcaacgatttgctggattcggtggttcaagtgatggacaagattatgaaacaattcgaaaaacgatgttaaaagaattaaaaaattcattccgtccagaatttttaaaccgtgtagatgatatcattgtattccataaactaacaaaagaagaattaaaagaaattgtaacaatgatggttaataaattaacaaatcgattatctgaacaaaacataaatattattgttactgataaagcgaaagacaaaatcgcagaagaaggatatgatccagaatatggtgcaagaccattaattagagcgatacaaaaaactatcgaagataatttaagtgaattaatattagatggtaatcaaattgaaggtaagaaagttacagtagatcataatggtaaagagtttaaatatgacattgctgaacaaacttcagaaactaaaacaccatcgcaagcataattataaaacagtccaaaacaaattaaagttttgggctgattttttagtagcattgaactatagaaattcgtgaaagtatccatcaacgaaacaatctaataaaataatcatcaaagtatagttaagaattatatgaaacaagttaatgagcctacagcgatagcataaaggtatgaatttttataaaggttttttgtttgaagatactagcaacttacgtcaaaataaaataggtctatataatattgtgataaatctagagaaaagagtttactaagaaattattaagattttatctttgaaagatatcgactatcaacatgatgtaagtttattttataatattcataaaaaataaatctgataaaacagtttgcgttagtagtcatgttaaaatacaaacaaatgtaactcacatttaatttgtcataatgggaatgtgcgtttaaaatagatttgttcaaaggaaagtggaggtgcaattttggccaagaaaaaagtgatttttgaatgtatggcttgtggttatcaatctcctaaatggatggggaaatgtcctaattgtggcgcttggaatcaaatggaggaaattgttgaaaaagcagccaatcctaaacatggagtgaaaaccaaggaattagcaggtaaagtacaaaaattaaatagtattaaacatgaaacaacgccgagagtgttaacagattcagcagaattcaaccgtgtattaggtggaggtattgtgagcggatcgttagtacttattggtggggatccaggtattggtaagtcaacgttacttttacaaatttgtgcatcgttatctcaaaagaaaaaagtactatatattactggagaagaatcgcttagtcagactaaattacgtgcagagcgattagatgaagattcaagtgaattgcaagtattagctgaaacagatcttgaagttatttatcaaacagtaaaagaagaacaacctgatttattagtagtggattcgattcaaacaatatatcatcctgaaatcagctctgcgccaggttctgtttcacaagttcgtgaaagcacacaaagtttaatgaatattgctaaacaaatgaacattgcaacttttatagtgggtcatgtaacgaaagaaggtcaaattgctggcccaagattgctagaacacatggttgatactgtgctttattttgaaggtgatgaacaccacgcatatcgaattttgcgagctgttaaaaaccgttttggttcaacgaatgaaatgggaatcttcgaaatgaagcaaagtggattaaaaggtgtaaataatccatctgaaatgtttttagaagaacgttcaacaaatgttccaggttcaacaattgttgcaaccatggagggaaccagaccacttttaatagaagttcaagcgctggtaactccaacgacttttaacaatccgagacgaatggcaacagggattgatcataatcgattaagtttgttgatggctgttttggaaaagaaagaaaattatctattacaacaacaagatgcttatatcaaagtagctggcggtgtaaagttaacggagccagcagttgatttaagtgtaattgtagcaactgcgtctagctttaaagataaagctgtcgacggattagattgctatattggagaagttggtttaacgggtgaggtacgtcgtgtatctcggatagaacaacgcgtgcaagaggctgcaaaactaggtttcaaacgtgtaattattcctaaaaataatataggcggatggacatatcctgaaggtatacaagtaataggtgtaactactgtacatgaagcattgtcatttgctcttcattcataaaacatcaagaaaggaggacattgtgtgaatatcgttaaactaatggttattattatttacttaattattgggagcgcattaggaataattattattcctgaaattgcaaatgatcttggattacaaaactccagctttttaaaaaatcactatgtagatggcattatcggtagtatttttatgttcttaatttttggtgtatttattagacgagttactaacgctataaaaggtttagaacattttattatgcgtagaagcgctgttgaaatactattcgcaacaataggtttaataatcggattacttatttctgttatggtgtcgtttatattagaatcaattggcaactctatttttaatcatttcattcctgtcataattacgatattactatgttatttcggtttccaatttggccttaaaaaacgagatgaaatgttaatgtttttacctgagaatatagcgcgttccatgtcacaacatactaaaagtgctacgccaaaaattatcgacacaagcgcaattattgatggtcgtattttagaagtcattcgttgcggttttatcgatggcaatattttaattccacaaggtgttattaatgaattacaaattgttgcagattcaaatgacagtgttaaacgtgaaaagggtaaaagaggcttagatattttaaatgaattgtatgatttagattatcctacaaaagtcatacatccgactaaatcacatagtgatattgatacgatgttattaaaactagctaaacaatatcacgcaaatattataacgacagactttaatttgaataaagtttgtcatgtacatggtatcaaagcattaaatgttaatgatttatcagaagcaatcaaacctaatgtacatcaaggtgatcaactgcatattttactgacaaaaatgggtaaagagcctggtcaggcagtaggatatctagatgatggtacgatggtagttgttgataatgctaaaaatcttattggcagtcatgtcaatttagaagtagtcagcttattgcaaacatcttcaggaagaattgtttttgctaaaaaaatcgaagatacagtatcattataaaaactgtagttgacgaaaataaaatagatattaaaaggtatatgaaatggcgaagtttgtaatttgaagtataactataaataaatgcaaaacatatcagttatcaaaaaatgcaaatagtgctaatatatcattgaaacaagttcattaagtgttaaattttagatattaataaagttattcttatagcaatcaagacatacaaaattagaatcaattttaacgtatttgagtagttaatttgaagtttaattttacagcacataatattcatttttaagtcgttgaaatgcgtatgtggtgcagtcttgattcttagggatagcttttttaaagtgttgaaaaaacaactgctttctatttaaaatttaagcatattacccagggaattatgttatgattaaacaatgaaattattttaaggtcatgttaaaaagcattgtttcgttttaacaataagacgagttacacatttgttatgacggtcgaagatagcaaatgaacaatttatatgaactaacttgaaaatttgatatttaatttaggagtgaaaaaaatgagcgatcgtataagagtaagatatgcaccaagtccaactggttatcttcatattggtaatgcaagaacagcattattcaattacttgtatgctaaacattacaacggagattttgtgattcgaattgaagatactgataaaaaacgtaatttagaagatggagaaacatcacaatttgataatcttaaatggttaggattagattgggatgaatctgtagataaagacaatggctacggaccatatcgtcaatctgaacgtcaacatatctaccaaccattaatagatcagttactagcagaagataaagcatataaatgctatatgacagaagaagaattagaagctgaacgtgaagcgcaaatcgctcgtggtgaaatgcctcgctatggtggtcaacatgcgcatttgactgaagaacaacgtcaacaatttgaagcagaaggacgccaaccatcaattcgtttccgagtacctcaaaaccaaacgtattcatttgatgatatggtaaaagggaatatttcatttgattcaaatggtattggtgactgggttatcgttaaaaaagatggcattccaacgtacaattttgcagtagctatagatgatcattacatggaaatttcagatgttattcgtggtgatgatcatatttcaaacacgcctaaacaaattatgatttatgaagcatttggctgggagccacctcgttttggtcatatgtcattaattgttaatgaagaacgtaaaaagttaagtaaacgtgatgggcaaattttacaatttattgagcaatatcgtgacttaggttatttacctgaagcgttatttaattttattgcgttattaggttggtctcctgaaggtgaagaagaaatcttttctaaagaagaatttatcaaaatctttgatgaaaagcgtttgtcaaaatcaccagcatttttcgataagcaaaaattagcatgggttaataaccaatatatgaaacaaaaagatactgaaacagtattccaattagcattacctcatttaattaaagcgaatttgattcctgaggcgccgtcagaagaggatttatcttggggacgcaaattaattgctctttatcaaaaagaaatgagctatgccggtgaaattgtacctttatcagaaatgttctttaaagaaatgccagctcttggtgaagaagaacaacaagtgatcaatggagagcaagtaccagagttaatgacgcacttattcagtaaattagaagcacttgaaccatttgaagcggctgaaattaaaaagacaattaaagaagttcaaaaagaaacaggaataaaaggcaagcaattatttatgcctattcgtgttgctgtaacaggccaaatgcacggtcctgaattaccaaatacaattgaagtacttggaaaagaaaaagtgctaaaccgtttaaaacaatataagtaatgaaatagacaagatcaaggtagtatatacttgaattttataacgtaaccacatatgataaagttgtattaacaaattacaacaatatgaatagagtattttatataaaacgaaggattagtaattaaatttatacgatgcagagagtgtacggttgctgtgagtacaacgtagaaattaatgaatgcaccttcgtaaaatgaattaaatatataatgagagtgatgagcattaagttgacatagtttccttgataatttggaagcgcccgcaattttattaatgttattcgctaaattcagagtggaaccgtgcggaagcgcctctaacaatacaatttgtatgttagtggtgcttttttgatatttaatttcgcacgtacttcaattatgtatttacgtagttcaatcattgaggaggaaatgatcttgttaaaaagaatgagagacgatataaaaatggtatttgagcaggatccagcggcacgttcaacattagaagtcattacaacgtatgcaggtttacatgcagtttggagtcatttgattgcacataagttatacaaccaaaaaaaatatgttgcagcacgcgcgatatctcaaatttcaagatttttcacaggtatagaaatccatccaggtgctaaaattggaaagcgtctatttatagatcatggtatgggcgttgtaataggagaaacatgtacaattggtgataatgtgacaatctatcaaggcgtgacacttggtgggacagggaaagaaagagggaaaagacacccagatataggagacaatgttttaatagcagcgggtgcgaaagttttaggaaatattaaaataaattcaaatgtaaatattggtgcaaattcagttgttttacaatcagttccaagttattcaacggttgttggtataccaggacatattgttaagcaagatggtgttcgagttggaaaaacatttgatcatcgccatctacctgatccaatttatgaacaaattaagcatttagaacgacaacttgaaaagactaggaatggagagattcaagatgattacattatataatacgcttacacgtcaaaaagaagtgttcaagccaatagaaccaggaaaggtaaaaatgtatgtatgtggtcctacggtatataactacattcatattggtaacgcaagaccagcaattaattatgacgtagtgagacgttactttgaataccaaggatataatgtagaatatgtatcaaattttacagatgtagatgataaattaattaaacgttctcaagaattaaatcagtctgttcccgaaattgcagaaaaatatatcgctgcttttcatgaagatgtcggtgctttaaatgttagaaaagcgacttcaaatccaagggtaatggaccatatggatgacattattcaatttattaaagatttggttgatcaaggttatgcatatgaaagtggtggcgatgtttactttagaacacgtaaatttgaaggttatggtaaattaagtcatcaatccatagatgacttaaaagtgggtgctcgtatagatgcaggagagcataaggaagatgcacttgattttacattgtggaaaaaagcgaagtctggcgagattagttgggatagtccatttggtgaagggagaccaggatggcatattgaatgttctgtaatggcatttcatgagctaggacctacaattgatatacatgcgggtggttcagatttacaatttccacatcatgaaaatgaaatagcacaatcggaagcacataatcatgcgccatttgctaattattggatgcataatggtttcattaatattgataatgaaaaaatgagtaaatcactaggcaactttattttagttcacgatattattaaagaagttgatccagatgtactaagattctttatgattagcgtacattatagaagtccaattaactataatctagaattggttgaatcagcacgtagtggactagagcgtattcgcaatagttatcaattaattgaagagcgcgcacaaattgctactaatattgaaaatcaacagacatatattgatcaaattgatgcgattttaaatcgttttgaaacagttatgaatgatgattttaatacagctaatgcaattacagcttggtatgatttagcaaaacttgcgaataaatatgtactagagaatacaacatcaacagaagtaattgataaatttaaagcagtttatcaaattttcagcgatgttttaggtgtaccgttaaaatctaaaaatgcagatgaattattggatgaagatgttgaaaaattaatcgaagagcgtaatgaagcaaggaaaaacaaagattttgcacgagcagatgagattcgagacatgctgaaatcacaaaacattatattagaagacacacctcaaggggttagatttaaacgtggataatcaacaagataatcacattaaattattgaatccattgaccttagcatatatgggagacgcagtcttagatcaatatgtacgtacgtatatcgttttaaagcttaaaagtaagcctaataaactacatcaaatgtctaaaaaatatgtatctgccaaaagtcaggcgcaaacgttagaatatttaatggagcaagaatggtttacagatgaagaaatggatattttgaagcgagggcgtaacgcgaaaagtcatactaaagctaaaaacactgatgttcaaacatatcgtaaaagttcagcgatagaagcagtgataggttttctttatttagaaaaaagagaagaacgattagaggcattattaaataaaataataacaatagtaaacgaaaggtagtgacaatgtggaagatacggttattgttggtaggcatgctgttagagaagcgattattactgggcatccgataaataagatattgattcaagaaggtattaaaaagcaacaaattaatgaaattttaaaaaatgcaaaagatcaaaaaatcattgttcaaactgtaccaaaatctaaattagattttttagcaaatgcaccacatcagggtgttgcagcgcttattgcaccatatgaatatgctgacttcgatcaatttttaaaacagcaaaaagaaaaaggaggtttatcgacagtacttatattagacggcttagaagacccgcataacttgggatcaattttaagaacagcagatgcaacgggagttgatggtgttattattcctaaacgtcgttcagttacactaacgcaaacagttgcaaaagcctcaacaggtgcaattgaacatgtaccagttattcgagtgacaaatttagctaaaactatcgatgatctaaaagataatggcttttgggtagctggcactgaagctaataatgcaacagattatagaaatcttgaagcggacatgtcattggctattgtaattggcagcgaaggacagggtatgagtcgtctggtaagtgataaatgcgatttctatattaagattccaatggttggacatgtaaacagtttgaatgcttcggttgcagcaagtttaatgatgtacgaagtatttcgaaaaagacatgatgttggagaaatataatgaaagaacgttacttaatcattgatggatacaatatgataggacaatcaccaacgctaagcgccattgcaaaagagaatttagaagaagctagaatgcaattaatagatgcaattgcaaattataatgctgttatttcagatgaaattatttgtgttttcgatgcttatgaccaatcgggtgttgaaagagaatacatgtatcatggcgttaaaacgatttttaccaaggaaaaagaaacagctgatagtttcatagaacgttatgtctatgaactttatgacaagcacactaagcatattacagttgtaacaagtgatatgagtgagcaacatgctatctttggatcaggtgcatatagaatatcatctcgcgaaatgtggagagatttaaaagaaaatgaaattgatgtgagtaaatcattagatgatataagtgaaaacaagccaagaactcgaattccgttatcttctgaaatccttgcagaatttgaaaaaatacgaagaggacatcataagaaatgacatttccttcatcttgaaattttgaatgtaacaatattaaactaaccttaaattttagatagaaggggttagtttaatacttgaaatatgatttgacaactcaagacagtacaatcaaacgtaacaatgcaataaatgataaagacttcgaaaagttagtaatggatctacaaccattaattattcgacgcatcaaaacatttggatttaatcattatgatttagaagacttatatcaagaaatacttatacggatgtataggtcggtccaaacatttgattttagtggagagcagcctttcacaaattatgttcaatgtttaattacgtctgtaaagtatgattatttgaggaaatatttagctacaaataaaagaatggataatttgattaatgaatatagagttacgtatccatgtgcaataaagcgttatgatgttgaaaacaattatttgaataaattagcaattaaagagttgattcgtcagtttaagtatttgagtgcatttgaaaaagatgtcatgtatttaatgtgtgaacaatataagccgagagaaattgctcaactgatgcatgtaaaagagaaagtgatttataatgctatacaacgatgtaaaaataaaataaaacgttatttcaaaataatttgaaaagcgccttaggacgtgaattgaattagaacgtgttacttcttgatggtttgacatttgttataaattttatgtatagtatactggtattataatgaataaaggtgaattattgtgaggaaaatacctttaaattgtgaagcttgtggcaatagaaattataatgttcctaagcaagaaggctcggcaacaagattaaccttaaagaaatattgtccaaaatgtaacgcgcacacaattcataaagaatcgaaataaatacattcgaaataatactttgataatatgttcaaaggatttggaggttgagcaaatggctaaaaaagaaagtttctttaaaggcgttaagtctgaaatggaaaaaacaagttggccgacgaaagaagagctatttaaatatactgtaattgtagtttctactgttatattcttcttagtctttttctatgccttagatttaggaattacagcattgaaaaatttattatttggttagaggagtgaagacatgtctgaagaagttggcgcaaagcgttggtatgcagtgcatacatattctggatatgaaaataaagttaaaaagaatttagaaaaaagagtagaatctatgaatatgactgaacaaatctttagagtagtcataccggaagaagaagaaactcaagtaaaagatggtaaagcaaaaacaaccgttaaaaaaacattccctggatatgttttagtggaattaatcatgacagatgaatcatggtatgtggtaagaaatacaccaggcgttactggttttgtaggttctgcaggtgcagggtctaagccaaatccattgttaccagaagaagttcgcttcatcttaaaacaaatgggtcttaaagaaaagactatcgatgttgaactcgaagttggcgagcaagttcgtattaaatcaggtccatttgcgaatcaagttggtgaagttcaagaaattgaaacagataagtttaagctaacagtattagtagatatgtttggccgagaaacaccagtagaagttgaattcgatcaaatagaaaagctttaattaacaattaaagttattaaactaaccaaaagataaaaaagagtattgattttttaattagaaaagtgttaaaattatgtggtcgcgcttttagagcgcccatttcgtcacgaaatgttaagagtgggagggcaaaactgagccctgtgaccacatcacgatatcaaggaggtgcacatcgtggctaaaaaagtagataaagttgttaaattacaaattcctgcaggtaaagcgaatccagcaccaccagttggtccagcattaggtcaagcaggtgtgaacatcatgggattctgtaaagagttcaatgcacgtactcaagatcaagcaggtttaattattccggtagaaatcagtgtttatgaagatcgttcatttacatttattacaaaaactccaccggctccagtattacttaaaaaagcagctggtattgaaaaaggttcaggtgaaccaaacaaaactaaagttgctacagtaactaaagatcaagtacgcgaaattgctaacagcaaaatgcaagacttaaacgctgctgacgaagaagcagctatgcgtattatcgaaggtactgcacgtagtatgggtatcgttgtagaataattttacgaatattaaatttgattacatgatttaaacgatgaagcagataacagagataataatgatgaattataaatataatctgaatgactagattaatgattgatttattcataagattaattcttctgttgtctgctcttaacttgcatctagcaagtaatgtgggaggaaattccgctaaaaccactaaaggaggaactataaatggctaaaaaaggtaaaaagtatcaagaagcagctagtaaagttgaccgtactcagcactatagtgttgaagaagcaattaaattagctaaagaaacaagcattgctaactttgacgcttctgttgaagttgcattccgtttaggaattgatacacgtaaaaatgaccaacaaatccgtggtgcagttgtattaccaaacggaactggtaaatcacaaagtgtattagtattcgctaaaggtgacaaaattgctgaagctgaagcagcaggtgctgactatgtaggtgaagcagaatacgttcaaaaaatccaacaaggttggttcgacttcgatgtagtagttgctacaccagacatgatgggtgaagttggtaaattaggtcgtgtattaggaccaaaaggtttaatgccaaaccctaaaactggaactgtaacaatggatgttaaaaaagctgttgaagaaatcaaagctggtaaagtagaataccgtgctgaaaaagctggtatcgtacatgcatcaattggtaaagtttcatttactgatgaacaattaattgaaaacttcaatactttacaagatgtattagctaaagctaaaccatcatctgctaaaggtacatacttcaaatctgttgctgtaactacaacaatgggtcctggagttaaaattgatactgcaagtttcaaataataaatgatataaacaattacaggctgaaagaaatatctttcagtctgtaaaaatatattgacaataagtattttccaagttatattacttattgtgattattttacctaagacagtaggagttatttataacttaaaatttatcctgccgaggctaaaattgacttgaacgtgatgatctatgatctttcaagcactttttgccgtgggtagaaagtgctttttttattaattttaaaaaaagcaccaaaaatttaaatggaggtgtctgaatgtctgctatcattgaagctaaaaaacaactagttgatgaaattgctgaggtactatcaaattcagtttcaacagtaatcgttgactaccgtggattaacagtagctgaagttactgacttacgttcacaattacgtgaagctggtgttgagtataaagtatacaaaaacactatggtacgtcgtgcagctgaaaaagctggtatcgaaggcttagatgaattcttaacaggtcctactgctattgcaacttcaagtgaagatgctgtagctgcagcgaaagtaatttctggatttgctaaagatcatgaagcattagaaattaaatcaggcgttatggaaggcaatgttattacagcagaagaagttaaaactgttggttcattaccttcacacgatggtcttgtatctatgcttttatcagtattacaagctcctgtacgcaacttcgcttatgcggttaaagctattggagaacaaaaagaagaaaacgctgaataatttttagcgtaaaaaaattaaaaataatggaggaattataaaatggctaatcatgaacaaatcattgaagcgattaaagaaatgtcagtattagaattaaacgacttagtaaaagcaattgaagaagaatttggtgtaactgcagctgctccagtagcagtagcaggtgcagctggtggcgctgatgctgcagcagaaaaaactgaatttgacgttgagttaacttcagctggttcatctaaaatcaaagttgttaaagctgttaaagaagcaactggtttaggattaaaagatgctaaagaattagtagacggagctcctaaagtaatcaaagaagctttacctaaagaagaagctgaaaaacttaaagaacaattagaagaagttggagctactgtagaattaaaataattcaagtatcttaaacttaataatcaaagttttatagcaagtattgctataatataatgattctttgagaagttaaaaccccgttattttgataacggggttttattcatttaaagactgagtgaaatgttataattataatgacgagttacaaagtgaagatgaggtggaataatgagtcattattatgatgaagatccaagtgtaattagcaatgaacaacgtattcaatatcaattaaatcatcataaaattgatttaataactgataacggagtgttttcgaaagataaagtagattatggttcagatgttcttgttcaaacttttttaaaaacgcatccacctggtccaagtaagcgaattgccgatgttggttgtggttacggaccaattggtttgatgattgctaaagtatcaccacatcattcaattacgatgctagatgttaatcacagagcgctagccttagttgaaaaaaaccaaaaattaaacggtattgataatgtgatcgtaaaggaaagtgatgctttgtctgctgtggaagacaaaagttttgattttattttaaccaatccaccaataagagcagggaaagaaaccgtgcatcgtatattcgagcaagcattacatagattagactcgaacggtgaactattcgttgtaattcagaagaagcaaggtatgccatctgcaaagaaaagaatgaatgaactttttggaaatgtagaagtggtaaataaagataaaggatactacattctgagaagtataaaagcttgaaatgaaatggatattctgttatagttatataatgtaaaaatttatgttcaataagtgtgtacttttacgttaaatagataagttaattaagaataaatatagaatcgaaaatggtgtcatcattagtgttgccgttttctttttgtctttttattaatatgcttatggtatttagctaaaagcggatcacataatttttgaggggtgaatctgtttggcaggtcaagttgtccaatatggaagacatcgtaaacgcagaaactacgcgagaatttcagaagtattagaattaccaaacttaatagaaattcaaactaaatcttacgagtggttcctaagagaaggtttaatcgaaatgtttagagacatttctccaattgaagattttactggtaatttgtcattagagtttgtggattaccgtttaggagaaccaaaatatgatttagaagaatctaaaaaccgtgacgctacttatgctgcacctcttcgtgtaaaagtgcgtctaatcattaaagaaacaggagaagttaaagaacaagaagtctttatgggtgatttcccattaatgactgatacaggtacgttcgttatcaatggtgcagaacgtgtaatcgtatctcaattagttcgttcaccatccgtttatttcaatgaaaaaatcgataaaaatggtcgtgaaaactatgatgcaacaattattccaaaccgtggtgcatggttagaatatgaaacagatgctaaagatgttgtatacgtgcgtattgatagaacacgtaaactgccattaacagtattgttacgtgcattaggtttctcaagtgaccaagaaattgttgaccttttaggtgacaatgaatatttacgtaatactttagagaaagacggcactgaaaacactgaacaagcgttattagaaatctatgaacgtttacgtccaggtgaaccaccaactgttgaaaatgctaaaagtctattgtattcacgtttctttgatccaaaacgctatgacttagcaagcgtgggtcgttataaaacaaacaaaaaattacatttaaaacatcgtttattcaatcaaaaattagctgagccaattgtgaatactgaaactggtgaaattgtagttgaagaaggtacagtgcttgatcgtcgtaaaatcgacgaaatcatggatgtacttgaatcaaacgcaaacagcgaagtgtttgaattgcatggtagcgttatagacgagccagtagaaattcaatcaattaaagtatatgttcctaacgatgaagaaggtcgtacgacaactgtaattggtaatgctttccctgactcagaagttaaatgtattacaccagcagatatcatcgcttcaatgagttacttctttaacttattaagtggtattggatatacagatgatattgaccatttaggtaaccgtcgtttacgttctgtaggtgaattactacaaaaccaattccgtatcggtttatcaagaatggaaagagttgtacgtgaaagaatgtcaattcaagatactgagtctatcacacctcaacaattaattaatattcgacctgttattgcatctattaaagaattctttggtagctctcaattatcacaattcatggaccaagcaaatccattagctgagttaacgcataaacgtcgtctatcagcattaggacctggtggtttaacacgtgaacgtgctcaaatggaagtacgtgacgttcactactctcactatggccgtatgtgtccaattgaaacacctgagggacctaacattggattgattaactcattatcaagttatgcacgtgtaaatgaattcggctttattgaaacaccatatcgtaaagttgatttagatacacatgctatcactgatcaaattgactatttaacagctgacgaagaagatagctatgttgtagcacaagcaaactctaaattagatgaaaatggtcgtttcatggatgatgaagttgtatgtcgtttccgtggtaacaatacagttatggctaaagaaaaaatggattatatggatgtatcgccgaaacaagttgtttcagcagcgacagcatgtattccattcttagaaaatgatgactcaaaccgtgcattgatgggtgcgaacatgcaacgtcaagcagtgcctttgatgaatccagaagcaccatttgttggtacaggtatggaacacgttgcagcacgtgattctggtgcagctattacagctaagcacagaggtcgtgttgaacatgttgaatctaatgaaattcttgtacgtcgtctagttgaagagaacggcgttgagcatgaaggtgaattagatcgctatccattagctaaatttaaacgttcaaactcaggtacatgttacaaccaacgtccaatcgttgcagttggagatgttgttgagtataacgagattttagcagatggaccatctatggaattaggagaaatggcattaggtagaaacgtagtagttggtttcatgacttgggacggttacaactatgaggatgccgttatcatgagtgaaagacttgtgaaagatgacgtgtatacttctattcatattgaagagtatgaatcagaagcacgtgatactaagttaggacctgaagaaatcacaagagatattcctaatgtttctgaaagtgcacttaagaacttagacgatcgtggtatcgtttatattggtgcagaagtaaaagatggagatattttagttggtaaagtaacgcctaaaggtgtaactgagttaactgccgaagaaagattgttacatgcaatctttggtgaaaaagcacgtgaagttagagatacttcattacgtgtacctcacggcgctggcggtatcgttcttgatgtaaaagtattcaatcgcgaagaaggcgacgatacattatcacctggtgtaaaccaattagtacgtgtatatatcgttcaaaaacgtaaaattcatgttggtgataagatgtgtggtcgacatggtaacaaaggtgtcatttctaagattgttcctgaagaagatatgccttacttaccagacggacgtccgatcgatatcatgttaaaccctcttggtgtaccatctcgtatgaacatcggacaagtattagagctacacttaggtatggctgctaaaaatcttggtattcacgttgcatcaccagtatttgacggtgcaaacgatgacgatgtatggtcaacaattgaagaagctggtatggctcgtgatggtaaaactgtactttatgatggacgtacaggtgaaccattcgataaccgtatttcagtaggtgtaatgtacatgttgaaacttgcgcacatggttgatgataaattacatgcgcgttcaactggaccatattcacttgttacacaacaaccacttggcggtaaagcgcaattcggtggacaacgtttcggtgagatggaggtatgggcacttgaagcatatggtgctgcatacacattacaagaaatcttaacttacaaatccgatgatacagtaggacgtgtgaaaacatacgaggctattgttaaaggtgaaaacatctctagaccaagtgttccagaatcattccgagtattgatgaaagaattacaaagtttaggtttagatgtaaaagttatggatgagcaagataatgaaatcgaaatgacagacgttgatgacgatgatgttgtagaacgcaaagtagatttacaacaaaatgatgctcctgaaacacaaaaagaagttactgattaatacgcaatttacaaaacaggcaaaaagatactaagctgaattttattgatgattcagtttagtactttaagccattttaaataaatgcaaatcaatcaaatagcacagctaatctaaattgaaggaggtaggctccttgattgatgtaaataatttccattatatgaaaataggattggcttcacctgaaaaaatccgttcttggtcttttggtgaagttaaaaaacctgaaacaatcaactaccgtacattaaaacctgaaaaagatggtctattctgtgaaagaattttcggacctacaaaagactgggaatgtagttgtggtaaatacaaacgtgttcgctacaaaggcatggtctgtgacagatgtggagttgaagtaactaaatctaaagtacgtcgtgaaagaatgggtcacattgaacttgctgctccagtttctcacatttggtatttcaaaggtataccaagtcgtatgggattattacttgacatgtcaccaagagcattagaagaagttatttactttgcttcttatgttgttgtagatccaggtccaactggtttagaaaagaaaactttattatctgaagctgaattcagagattattatgataaatacccaggtcaattcgttgcaaaaatgggtgcagaaggtattaaagatttacttgaagagattgatcttgacgaagaacttaaattgttacgcgatgagttggaatcagctactggtcaaagacttactcgtgcaattaaacgtttagaagttgttgaatcattccgtaattcaggtaacaaaccttcatggatgattttagatgtacttccaatcattccaccagaaattcgtccaatggttcaattagatggtggacgatttgcaacaagtgacttaaacgatttataccgtcgtgtaattaatcgaaataatcgtttgaaacgtttattagatttaggtgcacctggtatcatcgttcaaaacgaaaaacgtatgttacaagaagccgttgacgctttaattgataatggtcgtcgtggtcgtccagttactggtccaggtaaccgtccattaaaatctttatctcatatgttaaaaggtaaacaaggtcgtttccgtcaaaacttacttggtaaacgtgttgactattcaggacgttcagttatcgcggtaggtccaagcttgaaaatgtaccaatgtggtttaccaaaagaaatggcacttgaactatttaaaccattcgtaatgaaagaattagttcaacgtgaaattgcaactaacattaaaaatgcgaagagtaaaatcgaacgcatggatgatgaagtttgggacgtattggaagaagtaattagagaacatcctgtattacttaaccgtgcaccaacacttcatagacttggtattcaagcatttgaaccaactttagttgaaggtcgtgcgattcgtctacatccacttgtaacaacagcttataacgctgactttgatggtgaccaaatggcggttcacgttcctttatcaaaagaggcacaagctgaagcaagaatgttgatgttagcagcacaaaacatcttgaaccctaaagatggtaaaccagtagttacaccatcacaagatatggtacttggtaactattaccttactttagaaagaaaagatgcagtaaatacaggcgcaatctttaataatacaaatgaagtattaaaagcatatgcaaatggctttgtacatttacacacaagaattggtgtacatgcaagttcattcaacaatccaacatttactgaagaacaaaacaaaaagattcttgctacgtcagtaggtaaaattatatttaatgaaatcattccagattcatttgcttatattaatgaacctacgcaagaaaacttagaaagaaagacaccaaacagatatttcatcgatcctacaactttaggtgaaggtggattaaaagaatactttgaaaatgaagaattaattgaacctttcaacaaaaaattcttaggtaatattattgcagaagtattcaacagatttagcatcactgatacatcaatgatgttagaccgtatgaaagacttaggattcaaattctcatctaaagctggtattacagtaggtgttgctgatatcgtagtattacctgataagcaacaaatacttgatgagcatgaaaaattagtcgacagaattacaaaacaattcaatcgtggtttaatcactgaagaagaaagatacaatgcagttgttgaaatttggacagatgcaaaagatcaaattcaaggtgaattgatgcaatcacttgataaaactaacccaatcttcatgatgagtgattcaggtgcccgtggtaacgcatctaactttacacagttagcaggtatgcgtggattgatggccgcaccatctggtaagattatcgaattaccaatcacatcttcattccgtgaaggtttaacagtacttgaatacttcatctcaactcacggtgcacgtaaaggtcttgccgatacagcacttaaaacagctgactcaggatatcttactcgtcgtcttgttgacgtggcacaagatgttattgttcgtgaagaagactgtggtactgatagaggtttattagtttctgatattaaagaaggtacagaaatgattgaaccatttatcgaacgtattgaaggtcgttattctaaagaaacaattcgtcatcctgaaactgatgaaataatcattcgtcctgatgaattaattacacctgaaattgctaagaaaattacagatgctggtattgaacaaatgtatattcgctcagcatttacttgtaacgcacgacatggtgtttgtgaaaaatgttacggtaaaaaccttgctactggtgaaaaagttgaagttggtgaagcagttggtacaattgcagcccaatctatcggtgaaccaggtacacagcttacaatgcgtacattccatacaggtggggtagcaggtagcgatatcacacaaggtcttcctcgtattcaagagattttcgaagcacgtaaccctaaaggtcaagcggtaattacggaaatcgaaggtgtcgtagaagatattaaattagcaaaagatagacaacaagaaattgttgttaaaggtgctaatgaaacaagatcataccttgcttcaggtacttcaagaattattgtagaaatcggtcaaccagttcaacgtggtgaagtattaactgaaggttctattgaacctaagaattacttatctgttgctggattaaacgcgactgaaagctacttattaaaagaagtacaaaaagtttaccgtatgcaaggggtagaaatcgacgataaacacgttgaggttatggttcgacaaatgttacgtaaagttagaattatcgaagcaggtgatacgaagttattaccaggttcattagttgatattcataactttacagatgcaaatagagaagcatttaaacaccgtaagcgccctgcaacagctaaaccagtattacttggtattactaaagcatcacttgaaacagaaagtttcttatctgcagcatcattccaagaaacaacaagagttcttacagatgcagcaattaaaggtaagcgtgatgacttattaggtcttaaagaaaacgtaattattggtaagttaattccagctggtactggtatgagacgttatagcgacgtaaaatacgaaaaaacagctaaaccagttgcagaagttgaatctcaaactgaagtaacggaataacaagtatataacagaggctaaggctttagcctcttgttatttttatgtaaattatttgatttaatgttgacgaattctcttgttcaatgttaatatattaaaggtgatgcaagcagaactttggaggataaattattgtctaaggaaaaagttgcacgctttaacaaacaacattttgtagttggtcttaaagaaacgcttaaagcgttaaagaaagatcaagttacatctttgattattgctgaagacgttgaagtatatttaatgactcgcgtgttaagccaaatcaatcagaaaaatatacctgtatcttttttcaaaagcaaacatgctttgggtaaacatgtaggtattaacgtcaatgcgacaatagtagcattgattaaatgagaattagtaagtgttttacttactaaattttatttaacctaaaaatgaaccacctggatgtgtgggattaaaaagtgaagagaggaggacatatcacatgccaactattaaccaattagtacgtaaaccaagacaaagcaaaatcaaaaaatcagattctccagctttaaataaaggtttcaacagtaaaaagaaaaaatttactgacttaaactcaccacaaaaacgtggtgtatgtactcgtgtaggtacaatgacacctaaaaaacctaactcagcgttacgtaaatatgcacgtgtgcgtttatcaaacaacatcgaaattaacgcatacatccctggtatcggacataacttacaagaacacagtgttgtacttgtacgtggtggacgtgtaaaagacttaccaggtgtgcgttaccatattgtacgtggagcacttgatacttcaggtgttgacggacgtagacaaggtcgttcattatacggaactaagaaacctaaaaactaagaatttagtttttaattaaatcttaaacttaaaatatttaatataaggaagggaggatttacattatgcctcgtaaaggatcagtacctaaaagagacgtattaccagatccaattcataactctaagttagtaacaaaattaattaacaaaattatgttagatggtaaacgtggaacagcacaaagaattctttattcagcattcgacctagttgaacaacgcagtggtcgtgatgcattagaagtattcgaagaagcaatcaacaacattatgccagtattagaagttaaagctcgtcgtgtaggtggttctaactatcaagtacctgtagaagttcgtccagagcgtcgtactactttaggtttacgttggttagttaactatgcacgtcttcgtggtgaaaaaacgatggaagatcgtttagctaacgaaattttagatgcagcaaataatacaggtggtgccgttaagaaacgtgaggacactcacaaaatggctgaagcaaacaaagcatttgctcactaccgttggtaagataaaagcttttaccctgagtgtgttctatattaatgaattttcattaagcgttcatgcttagggcatcgccatatctatcgtatttattcagtaatataaactggaaggagaaaaaatacatggctagagaattttcattagaaaaaactcgtaatatcggtatcatggctcacattgatgctggtaaaacgactacgactgaacgtattctttattacactggccgtatccacaaaattggtgaaacacacgaaggtgcttcacaaatggactggatggagcaagaacaagaccgtggtattactatcacatctgctgcaacaacagcagcttgggaaggtcatcgtgtaaacattatcgatacacctggacacgtagacttcactgtagaagttgaacgttcattacgtgtacttgacggagcagttacagtacttgatgcacaatcaggtgttgaacctcaaactgaaacagtttggcgtcaggctacaacttatggtgttccacgtatcgtatttgtaaacaaaatggacaaattaggtgctaacttcgaatactctgtaagtacattacatgatcgtttacaagctaacgctgctccaatccaattaccaattggtgcggaagacgaattcgaagcaatcattgacttagttgaaatgaaatgtttcaaatatacaaatgatttaggtactgaaattgaagaaattgaaattcctgaagaccacttagatagagctgaggaagctcgtgctagcttaatcgaagcagttgcagaaactagcgacgaattaatggaaaaatatcttggtgacgaagaaatttcagtttctgaattaaaagaagctatccgccaagctactactaacgtagaattctacccagtactttgtggtacagctttcaaaaacaaaggtgttcaattaatgcttgacgctgtaattgattacttaccttcaccactagacgttaaaccaattattggtcaccgtgctagcaaccctgaagaagaagtaatcgcgaaagcagacgattcagctgaattcgctgcattagcgttcaaagttatgactgacccttatgttggtaaattaacattcttccgtgtgtactcaggtacaatgacatctggttcatacgttaagaactctactaaaggtaaacgtgaacgtgtaggtcgtttattacaaatgcacgctaactcacgtcaagaaatcgatactgtatactctggagatatcgctgctgcggtaggtcttaaagatacaggtactggtgatactttatgtggtgagaaaaatgacattatcttggaatcaatggaattcccagagccagttattcacttatcagtagagccaaaatctaaagctgaccaagataaaatgactcaagctttagttaaattacaagaagaagacccaacattccatgcacacactgacgaagaaactggacaagttatcatcggtggtatgggtgagcttcacttagacatcttagtagaccgtatgaagaaagaattcaacgttgaatgtaacgtaggtgctccaatggtttcatatcgtgaaacatttaaatcatctgcacaagttcaaggtaaattctctcgtcaatctggtggtcgtggtcaatacggtgatgttcacattgaattcacaccaaacgaaacaggcgcaggtttcgaattcgaaaacgctatcgttggtggtgtagttcctcgtgaatacattccatcagtagaagctggtcttaaagatgctatggaaaatggtgtcttagcaggttatccattaattgatgttaaagctaaattatatgatggttcataccatgatgtcgattcatctgaaatggccttcaaaattgctgcatcattagcacttaaagaagctgctaaaaaatgtgatcctgtaatcttagaaccaatgatgaaagtaactattgaaatgcctgaagagtacatgggtgatatcatgggtgacgtaacatctcgtcgtggacgtgttgatggtatggaacctcgtggtaatgcacaagttgttaatgcttatgtaccactttcagaaatgttcggttatgcaacatcattacgttcaaacactcaaggtcgcggtacttacactatgtacttcgatcactatgctgaagttccaaaatcaatcgctgaagatattatcaagaaaaataaaggtgaataatataacttgttttgactagctagcctaggttaaaatacaaggtgagcttaaatgtaagctatcatctttatagtttgattttttggggtgaatgcattataaaagaattgtaaaattctttttgcatcgctataaataatttctcatgatggtgagaaactatcatgagagataaatttaaatattatttttaattagaataggagagattttataatggcaaaagaaaaatttgatcgttctaaagaacatgccaatatcggtactatcggtcacgttgaccatggtaaaacaacattaacagcagcaatcgctactgtattagcaaaaaatggtgactcagttgcacaatcatatgacatgattgacaacgctccagaagaaaaagaacgtggtatcacaatcaatacttctcacattgagtaccaaactgacaaacgtcactacgctcacgttgactgcccaggacacgctgactatgttaaaaacatgatcactggtgctgctcaaatggacggcggtatcttagtagtatctgctgctgacggtccaatgccacaaactcgtgaacacattcttttatcacgtaacgttggtgtaccagcattagtagtattcttaaacaaagttgacatggttgacgatgaagaattattagaattagtagaaatggaagttcgtgacttattaagcgaatatgacttcccaggtgacgatgtacctgtaatcgctggttcagcattaaaagctttagaaggcgatgctcaatacgaagaaaaaatcttagaattaatggaagctgtagatacttacattccaactccagaacgtgattctgacaaaccattcatgatgccagttgaggacgtattctcaatcactggtcgtggtactgttgctacaggccgtgttgaacgtggtcaaatcaaagttggtgaagaagttgaaatcatcggtttacatgacacatctaaaacaactgttacaggtgttgaaatgttccgtaaattattagactacgctgaagctggtgacaacattggtgcattattacgtggtgttgctcgtgaagacgtacaacgtggtcaagtattagctgctcctggttcaattacaccacatactgaattcaaagcagaagtatacgtattatcaaaagacgaaggtggacgtcacactccattcttctcaaactatcgtccacaattctatttccgtactactgacgtaactggtgttgttcacttaccagaaggtactgaaatggtaatgcctggtgataacgttgaaatgacagtagaattaatcgctccaatcgcgattgaagacggtactcgtttctcaatccgtgaaggtggacgtactgtaggatcaggcgttgttactgaaatcattaaataatttctaatttcttagattttatataaaaagaagatccctcaatcgaggggtctttttttaatgtgtaaattttgtaatggctattcgatttagaagaacaataattgatgaaagactgactaataaaacttataactgataatactgtttaaataaaattgtagcgtcttgaacattgtaaaatgatcctctcaaagttttaattttttcaatgtctactttgaagggagcatttcattagtttatgtctcagattcatgtctttcaattaatttaaatgcttaatttgttttaaatacttgctctaattcaatgatttttaaaaatacagctacagcgtattttaatgatttttcatcaatatcaaatttgggattatggtgtggcgctgtaatacctttactttcattaccacaaccagtcagaaagaatgcacctggtcgtactttcaaataatgtgaaaaatcttctccaatcatcattaaatctgattcattaaagcgtacatgtatgtcatttgttgcttctttaataacttgatatgctttctcgttgttatggacaggcaaataccctttaatataattcaaatcatagttaatatcatttgctattgctaaaccttgtagtagcttatccattttgtccattacatgattctgtatatctgaatcgaaagttctaactgtacctttacaaaatgcttgatcaggtataacgctatctgtggtgcctgcttgaatcattccaaatgaaagtacagcttgtttaactggatcgattgtacgtgaaattattttttgtgcgcttaaaatgaactctgccatgatcactattgggtcaatggtttcatgaggtttggcaccatgaccgccacgacctttaattgtgacactgaattcatctggagaggccatgattgccccagcacgtgaatgaatagttccagtaggataaccactccataaatgtgtaccgtaaattctatctacattttccagacatccagcatctatcatttcttgagaaccacctggcatgatttcttcaccgtactggaatattaatacaacattaccttctaataaatgtttatgttcatctaaaatctctgctacagtaagtaaaattgctgtatgaccatcatgcccacacgcatgcatacatcctggatttttagacttataaggcacatcgtttaattcctcgacaggtaacgcatcaaagtcagctcttaatgcaatggtaggtcctgtgcccaagcctttaaatgtggctttgataccattgcggccgataggtgtttcaatatcacaagataactggcttaattggttaacaatataatcatgtgtttgaaattcttcaaaagataactcaggatattggtgtaaataacgtctgagttgaattgttttattttctttattatttgctagttggaaccaatctaacacccttatcactactttctaaaataatgtttatagtataacattttatgaaattatcgtactaaatgattgctttgagatattttatctataaatgataaggctttcaagttatgtagaattactgtatgataaaggtattaccaaacaatacttaagggggattatatactgtggttcaatcattacatgagtttttagaggaaaatatatattatctaaaagaaaatggtttgtataatgaaatagatacaattgaaggtgcaaacggaccagaaatcaaaatcaatgggaaatcatacattaacttatcttcaaataattatttaggactagcaacaaatgaagatttgaaatcagctgcaaaagcagctattgatacacatggtgtaggtgcaggcgctgttcgtacaatcaatggtacattagatttacacgacgaattagaacaaacactagcaaaatttaaaggaacagaagctgcaatagcttatcaatcaggatttaattgtaatatggctgctatttcggctgttatgaataaaaatgatgctattttatcagatgagcttaatcatgcatcaattattgatggatgtcgcttatcaaaagctaaaattattcgagttaaccattcagacatggatgatttacgtgcgaaagcaaaagaagcagttgaatcaggtcaatacaataaagtgatgtatatcactgatggtgtttttagtatggatggtgatgtggctaaattacctgaaattgtagaaattgcagaagaatttggtttattaacttatgttgacgacgctcatggttcaggtgttatgggtaaaggcgctggtacggttaaacattttggtttacaagataaaatcgatttccaaataggtacgctttctaaagcaattggtgtcgttggcggttatgtagcaggtacaaaagagttaatagattggttaaaagcacaatcacgaccattcttattctctacatcattagcacctggggatactaaagcaataactgaagcagttaaaaagttaatggcttcaactgaattacatgataaattatgggacaatgcacaatatttaaaaaacggattgtcaaaattaggatatgatacaggtgagtcagaaactccaattacaccagtaattattggtgatgaaaaaacaactcaagaatttagtaagcgtttaaaagatgaaggtgtctatgtgaaatctatcgttttcccaacagtaccaagaggtacaggacgtgtaagaaatatgcctacagctgcacatacaaaagacatgttagatgaagcaattgcggcttatgaaaaagtaggaaaagaaatgaagttgatttaaaatttatttattcccacggcaaatattgtcgtgggctttttttaaaatgtttagtttattaacagtaagttcttataacaatgtttagttgtatcaaccattaaagtttgaattttaaaagcatcttgtagaatttagttgtatttttacaaagaaattcattttaattatttttgataatgagcattttaatagtaatacatgtttatagtgtgtagtatatgtctatactagtagtaactatatagagaaagtaggaataaactatgtcacaagatgtaaatgaattaagtaagcaaccaacgccagataaagcagaagataacgcatttttcccatcaccatattcccttagtcaatatacagcacctaaaacagattttgatggtgttgaacacaaaggtgcctataaagatggtaaatggaaagtattgatgattgctgctgaagagagatatgtattattggaaaatggaaaaatgttctctacgggtaatcatcctgttgaaatgttattacctttacatcatttaatggaagcaggttttgacgttgatgttgcgacattatctggttatccagctaaattagaattatgggctatgccaactgaagacgaggcagttataagcacttataataaattgaaagaaaaattaaaacagccaaaaaaattagcagatgtgattaaaaatgaattaggacctgattcagactatttatctgtctttatcccaggtggacatgctgcagttgttggtatttctgaaagcgaagacgttcaacaaacattagattgggcattagaaaatgaccgctttatagttacattatgtcatggaccagcagcactactttcagcagggcttaacagagaaaaatctccattagaaggatactctgtttgtgtcttccctgactcattagatgaaggtgcaaatattgaaataggttatttacctggacgcttgaaatggttagttgctgatttattaactaaacaaggtttaaaagtagtcaacgacgatatgacaggaagaacgttaaaagatcgtaaattattaacaggtgacagtcctttagcttcaaatgagttaggaaaattagcagttaatgaaatgttaaatgcaatacaaaataaataattaaatattaattagaggagcctcatatgtaaatgtatgagggctctttttttggcaaaatttaagtgatacttgtaaaatagaacctattatgagtatgatttaagaaaacgcttgcataactaataactgcaactagcgatatggaggaaacatgatgtcttatagcattggaattgattatggaactgcttcaggccgtgtgtttttaattaatacgactaacggtcaagtagtatcaaaatttgtgaaaccatatacacatggtgtcattgagagtgaattaaatggtttaaaaataccacatacatatgcacttcaaaatagtaatgattatttagaaattatggaagaaggaatttcatatatagtacgtgaatcaaaagtagatccagtcaatatagtaggtattggtatagactttacttcatctactattatttttactgacgaaaaccttaacccggtacataatttaaaacaatttaaaaacaatccacatgcgtatgtgaaactttggaaacatcatggtgcatataaagaggcagagaaattatatcaaactgctattgaaaataataataagtggttaggccattatggatataatgttagtagtgaatggatgattcccaaaataatggaagtcatgaatcgagcaccagaaattatggaaaaaacggcttatattatggaagcgggcgattggattgtaaataaattaactaataaaaatgtacgctcgaattgtggattaggtttcaaagcattttgggaagaagaaacagggtttcattatgatttatttgataaaatagaccccaaattatcaaaagtaattcaagataaagtatctgcaccggttgttaatattggtgaagcagtagggaaactggatcataaaatggcacagaaattaggattatcaaaagagactatggtaagtccttttattattgatgcccatgctagtttattaggtattggatctgaaaaagataaagaaatgactatggtgatgggaacaagcacatgccatcttatgttaaatgaaaagcaacatcaagtgccaggtacatcaggttctgtaaaaggagcaattattccagaattatttgcttatgaagcggggcaatcagcagtaggtgatttgtttgattatgtcgctaagcaagcaccaaagtcatatgtagatgaagcagcaaatagaaatatgactgtatttgaattaatgaatgaaaagataaaacatcaaatgccaggtgaaagtgggctcattgctcttgattggcataatggaaatcgaagtgtattaagtgatagcaatttaacaggttgtatctttggattaactttacaaactaagcatgaggatatttatagagcatatttagaagctacagcatttggtactaagatgattatgcaacagtatcaagattggcatatggaagtagaaaaagtatttgcatgtggcggtatacctaaaaagaatgctgttatgatggatatctatgcgaatgtactgaataaaaaactaattgttatggatagtgagtatgcaccagcaataggcgcagcaatattaggtgcagtcagtggtggcgcacataattcaattaatgatgcagttgatgctatgaaagagccaattttatacgaaattaatccagaagcggaaaaagtacaaagatatgaaacattatttaaagcttataaggctttacatgatatccatggatataaaaaagctaatataatgaaagatatccagagtttaagagttgagggataaaaaatttaatttgacagtaattagtaatattcaacgctataaattactaaaattaattaatacagctagaattttcatttacagaaatatcagcaacatgtacatgtcatatatacaagaaagcgcttttatattataattattatgaaaatgaatattatgtccacttgtgatggactatggttatatagaagagacaaaggagatatttctatgaaaaaaattatgattactggtgcattaggacaaattggtacagaattagttgttaagtgcagagagatttatgggacagataatgttcttgctacagatattagggaacctgaagcagactcacctgtacaaaatggaccatttgaaatcttagacgtaacagatcgtgaccgcatgtttgagttagttagggactttgaagcggatagtctaatgcatatggcagcattattatcagcaactgctgagaaaaatccaattcttgcttgggatttaaatatgggtggattaatgaatgcattagaagctgcaagaacttataatttgcactttttcacaccaagttcaattggtgcatttggagactcaactcctaaagttaatacgccacaagtaacgattcagcaacctacgacaatgtatggtgtaaataaagtagctggagaattattatgtcaatactatttcaaacgttttggtgtagatacaagaagtgttagattcccaggtttaatctcgcatgttaaagagccaggtggcggtactacagactatgctgttgaaatatacttcaaagcagtaagagaaggtcattatacaagcttcatagataaaggcacgtatatggatatgatgtatatggatgatgcaattgaagcaattattaaacttatggaagcagacgacgctaaattagaaactagaaacggttataatttgagcgcaatgagttttgatccagagatggtaaaagaagcaattcaagaatactatccgaattttacattagattatgatgttgatcctattagacaaggtatcgctaatagttggccggattctattgatacaagctgttcacgtggcgaatggggatttgatcctaaatatgatttagcgagcatgactaaattaatgttagaagctattgaacaaaaagatactgttaaaaataataactaatcatttccattcactttaatacacggaatgatattttaaattactctttattttaataaactagtgcatgaattctaatattattcattatacatattgaatttgcgagcttagttcattttaaagtaaagagttttttgtatgtaaagtatattagtaaaacacagattacttgtctctgtgaaattaatacgtttatactaaaagatatagtctttctagaaaatctgttaattaattttgaatttttagaaaatttattgaacagcaaaatatggattgttataatttaagttaaacaaattcttatacaatattattaggaggcaatcaccatgtcacaagcagttaaagttgaacgacgagaaacattaaaacaaaaaccaaatacatctcaactaggttttggtaaatattttactgattatatgttgagttatgattatgatgcagataaaggatggcatgatttgaagatagtaccttatggtcctattgaaatttcacctgctgcacaaggtgttcattatggtcaatcggtattcgaaggattaaaagcatataaaagagatggggaagttgcacttttccgtcctgaagaaaattttaagcgtcttaataactcgttagcacgattagaaatgcctcaagtagacgaagcagaattgttagaggggctaaaacaattagttgatttagaaagagattggattcctgaaggggaaggtcaatcattatatattcgtccatttgtttttgcaacagaaggggcacttggcgttggtgcatcacatcagtataaattattaattattttatctccttcaggtgcatattatggtggtgaaactttaaaaccaactaaaatctatgtagaagatgaatatgtgcgtgctgttcgtggcggtgtaggctttgcgaaagttgcaggtaactatgcggcaagtttattagcacaaactaatgcaaataaattaggttatgaccaagtattatggcttgatggtgttgaacagaaatatatcgaagaagttggtagcatgaacattttcttcgttgaaaatggcaaagtaattacaccagagttgaatggcagtattttacctggtattacacgtaaatctattatcgaattagctaaaaacttaggatatgaagtcgaagagcgccgcgtttcaatcgatgaattattcgaatcatatgataaaggtgagttaacagaagtatttggtagtggtactgcagcagttatttcacctgtgggtacattgagatacgaagatcgtgaaatcgttattaataataatgagactggtgaaattactcaaaaattatacgacgtctatactggtattcaaaatggtactttagaagataaaaatggttggagagtcgttgtaccaaaatattaataaaaattgaatatgatcatgaaaacaatatgtaaaagttaatcatgactaaaatccctttcaatgaagcgaagcatggtaataaattaagtttacaatgtttattgttaagtattgaaagggatttcacttattatatttaattcaatatttaaaaagaacaatactacgagttcattttcagggaaataacgaacatcatagaatcagcataatacgaaataaataaataggagtattgatattaatggaatggatattatttgataaagatggtacgttaattgaatttgatagaagttgggaaaaaataggggtacgatttgtacaatcattgcttgagactttcccagtacataataaagaagctgctttaagacaactcggtgtcattaaagaatctattgatccaaaatcagtgatgggttcaggatctttacaacaaattattcaggcatttaatgatgtgacgggacaagatacaaccgactggtccaagtcaacaagtcaaaagttggtagatgaacgtattcctgaaattaattgggtagaaggtgttaaagaagcacttatcgatttgaaagcaaaaggctatcaactaggtattgttacgagtgatactaaaaaaggtgtagaacaatttttagcacataccaatgctacctcgttgttcgatttgatcatttctaccgaagcggatgcctatgagaagccaaatcctaaagtattatcgcctttatttgagcaatataatgtagatcctcagaaagtagctatagtaggagacactgctaatgatatgaagactgcaagtaatgcaaatttaggtatggcaataggcgtattaacaggtattgcaacaaaagaagaattacatgaagctgatattattttaaatagtgcggcagatattttagaagctttaaattaaaaagaaagacatagtgtatatgtgaattaatgtattcgatagaattgataaaataatcgatgatttctatggaagttacattgaattaaagcacatacactatgtctttagtcttttatcgtgtatctacttgtcgatacgtttttataatatgagcgattttatcaatcataggatttaaagaatcaggatctttgtgtatatcatattcattaatgttgatacgtacaactggacatgcattaaagctgttaatccaatcgtcataacgtttaaataactttttccaatattcaggatcagtatttatttccatttcgcgaccacgttcaataatacgatcaatgacctcatcatagttacattctaaataaatcattacatcaggtttaggaaaataaggtgtcatgaccatggcattaaataagtctgaatatgttttgaaatcctctttactcattgtgccttcttcttcatgcatttttgcaaaaatatcaacatcttcataaattgatcgatcttggacaaagccaccaccatattcaaacatacgcttttgttctttaaaacgttcagctaagaagtaaatttgtaaatggaaactccatcgttcaaaatcgctgtaaaatttatctaaatatggattatgttcgacattttcaaaagacgttttaaagtttaatttatctgcaagtgcttgcgttagtgttgatttcccaacaccaactgtacctgcaatggttataatggcattttgtggaataccgtaattattcattggtaatatctcctatcataggtaatataatatgtaatatatcttcgtaatcttgttcattttttagaaaatcaatagaagttgtatcgattaaaactacatttgaaccattactttgtaaggactcataatactcacgataatctttttttaactttaatagatattcatcttctatttgatgttcaaaactacggttacgtttagcaattctagattttaacacatcgaggtctgcatctaaaaagataatcatattcggcataatcatatcttcagttaaaatatcataaattttactgaatttctgaaattcaacagaactcaaagtatttttagcaaatatcttatttttatgtatatgataatcactaactacaccttgatttagttgtgttacatcttgaaattgcttatatctattgcataaaaagaacatttcagtttgaaaactccatttagagatatcttcgtaaaagtctgataaaaatggattttctgtgatgatttctttttcttcataaaaatctaaagtttgacttaatttgtgtgcaagtgaagatttacctacgccaataggaccttcaattgctataaaaggtttgttcatattcacatctccaaatgttaaaatagacattgagtattgtaccataagtgaggtatctggacataaatgacaaatgatatatattttatgacattagcgattgaagaagctaaaaaagcagctcaacttggcgaagtacctataggtgctatcatcactaaagatgatgaagttatcgctagagcacataatttaagagaaacactacaacaaccaacggcgcatgctgaacatattgcaattgaacgtgcagccaaagtgttaggtagttggcgtttagaaggttgcacattatatgtaaccttagaaccatgtgtcatgtgcgcaggaacaattgtaatgagtcgcattccaagagtcgtctatggcgcagatgatcctaaaggtggttgtagtggcagtttaatgaatttattgcaacaatctaattttaatcatcgtgcaattgttgataaaggtgtacttaaagaagcatgtagcacattattaacaacattttttaaaaacttaagagccaataagaaagccaccaattagacgatagtacatactaattaaaatttgttagaattacattatatgataaattaatgacaatataaatgttaatagaaaagtatgtgcgctgagtatatattcttatttaagaacaagattttaaatttacgaaacgaggtaacataatgataaaactaatagccactgatatggatggcacactacttaatgcagcacatgaaatttctcaacctaatattgatgcgattaaatacgctcaagaacaagggataacggttgttatcgcgacaggtcgagcattttatgaagcacaagcaccagttgctgacacagatttaacagtaccatatatttgtttgaatggtgctgaagtacgtgatgaaactttcaatgtaatgagcacttcacaccttaataaatcgttagtacacaaaattacaaatgttttaaaagatgcaggtatttattatcaagtatacacgagtcgtgcgatttatactgaagatccacaaagagatttagacatttacatagatattgctgagcgtgcaggtcaacacgcaaacgttgagcgtattaaaaatggtattcaaagacgcatagataatggtacgttgaaagttgttgataattatgatgctattgaaaacatacctggtgaattaattatgaaaatattagcatttgatggaaatttagaaaaaattgacaaagctagtaaaattttagctgaatctccgaatttagctatatcatcatcttcgagaggaaatatagaaataacgcattcagatgcacaaaaaggtattgcgctagaaacaattgccgaaagattagagattgaaatgaaagatgtcatggctataggtgacaatttaaatgacttatcaatgttagagaaagttggctatccagttgcgatggaaaatggtgctgaagaagttaaaaaaatagcaaaatatgtcacagatacgaatgaaaatagtggtgttggaaaagctattatgaaattattacgtgaacaacaagtttaataaaaaagaggggtcaaatatgaaaggattaattattattggcagtgcacaagtgaattcacatacaagtgcactagcaagatacttaactgagcattttaaaacacatgatattgaagcggaaatattcgatttagcagaaaaaccgttaaatcaattagatttttcaggaacaacaccgtctattgatgaaatcaaacaaaatatgaaagatttaaaagagaaagcaatggcggcggactttttaatattaggaacgccaaactatcatggttcatattctggaatattgaaaaatgcattagatcatctaaatatggattattttaaaatgaaacctgtaggcttaataggaaatagtggtggtattgttagttcagagccattgtcacatttaagagtaatcgtcagaagtttactaggcattgctgtaccaactcaaatagcaacacatgattctgattttgctaaaaatgaagatggttcatattacttaaatgatagtgaattccagttacgagcaagattattcgtcgatcaaattgtatcatttgcgcataatagtccatatgaacatttaaaataaattaaaaaatatgtaaatatacattaaaaataggtatgtagcttaaggtgtttcattgagaatgcttttaagtcacatgcctatttttttgttctaatgcaccaatagtaagcctttgagtttactgttgtgagcaatgttattaattaaaataagatgtaatagcgaaatgaaaacaagcttagattaaaagtaaggtttaaaaatatagataaataatttaaagcaattgaagaaaaaaagtattaaaaattgcaattcttaaactgaaattcatattaatatttactgcaaataacattgtaaaataaagaaaaataattaaagtattgcactttattggaatttatattacgatagtaatgcagaaatttatatatgcaaaatattatatttatcaaattttgatattttaaaggagtattattaaatgaataataaaaagacagcaacaaatagaaaaggcatgataccaaatcgattaaacaaattttcgataagaaagtattctgtaggtactgcttcaattttagtggggacaacattgatttttgggttaagtggtcatgaagctaaagcggcagaacatacgaatggagaattaaatcaatcaaaaaatgaagcgacagctccaagtgagaataaaacaactgaaaaagttgatagtcgtcaacaaaataatgttgaacaaagtacaacgtcaaaccaaccaaaagtaaatgagtctgataatacttcagttaaagaaactactgaagaacctcaaaatacaacttctacacaaccaactaaacaaaataacgatgcgacggcaaataaagataatttagcggctcaaaatatttcaacgcaggctaatgatgtttcagctactcctaaaacaacgactattaaaccaagaacattaaaccgtatggctgtgaacacagtagcagcaccacaacaaggtacaaatgttaatgataaagttcatttttcaaatattgatattgctattgataaaggacatgtaaattcaacaactggcaaaactgaattttgggcaacttctagtgatgttttaaaattaaaagcgaattacaaaatcgatgattctgttaaagagggcgatacatttacctttaaatatggacagtatttccgtccgggttctgtaagattaccttcacaaactcaaaatttatataatgcccaaggtaatattattgcaaaaggtatttatgatagtacaacaaacacaacaacatatacttttacgaactatgtggatcaatatacaaatgttagtggtagctttgaacaagttgcatttgcgaaacgtgaaaatgcaacaactgataaaactgcttataaaatggaagtaactttaggtaatgatacatatagcgaagaagtcattgtcgattatggtaataaaaaagcacaaccgcttatttcaagtacaaactatatcaataatgaagatttatcgcgtaatatgactgcatatgtaaatcaacctaaaaatacatatactaaacaaacgtttgttactaatttaactggatataaatttaatccaaatgcaaaaaacttcaaaatttacgaagtgactgatcaaaatcaatttgtggatagtttcaccccagatacttcaaaacttaaagatgttactggtcaattcgatgttatttatagtaatgataataaaacagctacagtcgatttaatgaaaggccaaacaagcagtaataaacaatacatcattcaacaagttgcttatccagataatagttcaacagataatgggaaaattgattatactttagacactgacaaaactaaatatagttggtctaatagttattcaaatgtgaatggctcatcaactgctaatggcgaccaaaagaaatataatctaggtgactatgtatgggaagatacaaataaagatggtaaacaagatgccaatgaaaaagggattaaaggtgtttatgtcattcttaaagatagtaacggtaaagaattagatcgtactactactgatgaaaatggtaaatatcagttcacaggtttgggaaatgggacttacagtgtagaattttcaacgccagcaggttacacaccaaccactgcaaatgcaggaactgatgatgctgttgattcagatggactaactacaacaggtgtcattaaagacgctgacaacatgacattagacagtggtttctataaaacaccaaaatatagtttaggtgattatgtttggtacgacagtaataaagacggcaaacaagattcaactgaaaaaggtatcaaagatgttaaagttactttattaaatgaaaaaggcgaagtaattggaacaactaaaacagatgaaaatggtaaatatcgtttcgataatttagatagcggtaaatataaagttatttttgaaaagcctgctggcttaacacaaacaggtacaaatacaactaaagatgataaagatgcagatggtggcgaagttgacgtaacaattacggatcatgatgatttcacacttgataacggatacttcgaagaagaaacatcagacagcgactcagattcagactcagatagcgactcagactcagatagcgactcagattcagacagcgattcagactcagatagcgactcagactcagatagcgactcagactcagatagcgactcagattcagacagcgattcagattcagatagtgaattagactcagacagtgactcagattcagacagcgactcagattcagacagcgactcagattcagatagcgactcagattcagacagtgattcagattcagacagtgactcagattcagacagcgattcagactcagatagcgattcagattcagatagtgactcagactcagatagcgattcagactcagatagcgactcagactcagacagtgactcagattcagatagcgactcagactcagacagtgactcagactcagatagcgattcagattcagacagtgactcagactcagatagtgattcagactcagataatgactcagattcagatagcgactcagactcggatagtgattcagactcagatagtgactcagactcagacagtgactcagactcagatgcaggtaagcatacaccggctaaaccaatgagtgcagttaaagaccatcacaataaagcgaaagcattaccggaaacaggtagtgaaaataacggttcaaataatgcaacgttatttggcggattattcgcagcattaggatcattattgttattcggtcgtcgtaaaaaacaaaataaataatattatttcatccaggtccgtgaggcctggttttttatttatatggaatacataaatcgaaaattgtaagtagcatatgcaatttaatttgacgtaaaaatgtaagtgtctatgaattaaaaaaactcatatattcatttcaatattggataataatatttttgtgataatcaaataaaaattacaaaactcataaaaaatcttatttaaatacaaaacctaaataactttttgcgataaagaaaaataattaaagtattgtgctttatctaaatctgtaatactatattaatatacatttttgtatttaaaacaattgtattatttaaaaatttgatggattaagagcaataaaatgctaaacagagaaaacaaaacggcaatgacaagaaaaggcatggtatcaaatcgattaaacaaattctcgattaggaagtacacagtgggaacagcatcaattttagtaggtacaactttgatttttggtctagggagccaagaagctaaagctgcagaagtaaccaacaaggaaatgaaggaagatgcaacatcagtaaataatgatcaagtgtctaaaaaagttgatacagagcaactaaataatgacggtaatactagtaaagttgatacagagcaactaaaagatgagaatattaataaagttgctaatcaaaaagaagtaactagagtagaaaatagtgtcgcttcagaaaaaaataataactctaagccatctgaaaacggaaaattacaaacgtctgatgttaaaaaaactgaagataataatgcaacttcagatgatcaagttactactacagttaattcacagcaattaaatactgataacacaacttcaatgtcgtcagcaccaattaatgtacgtaaagatgacttaaaatttaataatgaagaagtaagaaatgtaggagaaaaaagcgataatactgacaatgcaaatagttcagaattaataaagccaaaaactacagaacctaaacgtttgaatacaagaatgcgtatagcagcaatacaaccaaactcaacagattctaaaaatgttaatgatttaatcacatcaaatacaacattaactgtcgttgatgcagataatagcaaaacgattgtaccagcccaagattatttatcattaaaatcacaaattacagttgatgacaaagttaaatcaggtgattattttacaattaaatactcagatacagtacaagtatatggattgaatccggaagatattaaaaatattggtgatattaaagatccaaataatggtgaaacaattgcgactgcaaaacatgatactgcaaataatttaattacatatacatttacagattatgtcgatagatttaattctgtacaaatgggaattaattactcaatttatatggatgcagatacaattcctgtagacaagaaagatgttccttttagtgtaactattgggaatcaaactacaacaactacagcagatattacttatccggcttataaagaagctgataataattcaatagggtcagcttttacagaaacagtttctcatgtaggaaatgctgaagatcctggttattataaccaagtagtttatgtgaatcctatggataaagatttaaaaggggctaatttaaaagttgaagcgtatcatccgaaatatcccgctaatattggtcaaattaatcaaaacgttactaatataaaaatatatcgtgttcctgaaggatatacattgaataagggatacgacgtaaatgctaatgatttagtagacgtaaccgatgaatttaaaaataaaatggcctatggaacaaatcaaagtgttaatatcgattttggtgatattacatcagcgtatgttgtaatggttaatacaaaattccaatatacaaatagcgaaagtccaactcttgttcaaatggctactttatcttctacaggtaataaaacagtttctactggcaatgctttaggattcactaacaatcaaagtggcggagctggtcaagaagtatataaaattggtaactacgtatgggaagatacaaataaaaacggtgttcaagaattaggagaaaaaggcgttggcaatgtaactgtaactgtatttgataataatacaaatacaaaagtaggagaagcagttactaaagaagatgggtcatatttgattccaaacttacctaatggagattatcgtgtagagttttcaaacttaccacaaggttatgaagtaaccccttcaaaacaaggtaataacgaagaattagattcaaacggtgtatcatcagttattacagttaatggcaaagataatttatctgctgacttaggtatttacaaacctaaatacaatctaggcgactatgtatgggaagatataaataaaaatggtatccaagatcaagatgaaaaaggtatatctggcgtaacggtaacattaaaagatgaaaacggtaacgtgttaaaaacagttacaacagatgctgatggcaaatataaatttactgatttagataatggtaattataaagttgaatttactacaccagaaggttatacaccgacttctacaaatacaggtggaaatgatactgttgactctaatggtttaacaacaacaggtgttattaatggtgctgataacatgacattagatagtggattctacaaaacaccaaaatataatttaggtaattatgtatgggaagatacaaataaagatggtaagcaggattcatctgaaaaaggtatttcaggcgtaacagttacattgaaaaatgaaaacggtgaagttttacaaacaactaaaacagataaagatggaaaatatcaatttactggattagaaaatggaacttataaagttgaatttgaaacaccatcaggttacacaccaacacaagtaggttcaggaactgatgaaggcatagattcaaatggtacatcaacaactggtgtcattaaagataaagataacgatactattgactctggtttctacaaaccgacttacaacttaggtgactatgtatgggaagatacaaataaaaacggtgttcaagataaagatgaaaagggcatttcaggtgtaacagttacgttaaaagatgaaaacgacaaagttttaaaaacagtaacaacagatgaaaatggtaaatatcaattcactgatttaaacaatggaacttataaagttgaattcgagacaccatcaggttacacaccaacttcagtaactactggaaatgatactgaaaaagactctaatggtttaacaacaacaggtgtcattaaagatgcagataatatgacattagacagtggtttctataaaacaccaaaatatagtttaggtgattatgtttggtacgatagtaataaagatggtaaacaagactcaactgaaaaaggtatcaaagatgttaaagttactttattaaatgaaaaaggcgaagtaattggaacaactaaaacagatgaaaatggtaaatatcgtttcgataatttagatagcggtaagtataaagttatttttgaaaatcctgctggcttaacacaaacaggtacaaatacaactgaagatgataaagatgcagatggtggcgaagttgatgtaacaattacggatcatgatgatttcacacttgataacggatacttcgaagaagaaacatcagacagcgactcagattcagacagcgattcagactcagatagcgactcagactcagatagcgactcagattcagacagcgattcagactcagatagcgattcagattcagatagtgactcagactcagacagtgattcagattcagatagcgattcagattcagacagtgactcagactcagatagcgactcagactcagatagcgactcagattcagatagcgactcagactcagatagcgactcaggctcagatagcgactcagactcagatagcgactcagactcagacagtgactcagattcagacagtgactcagattcagatagcgactcagattcagacagtgattcagattcagacagtgactcagattcagacagtgactcagactcagatagtgactcagactcagatagcgattcagactcagatagcgactcagattcagacagtgactcagactcagatagcgactcagactcagacagcgattcagactcagatagcgactcagactcagatgcaggtacacacacacctgttaaaccaatgagtactactaaagaccatcacaataaagcaaaagcattaccagaaacaggtagtgaaaataacggctcaaataacgcaacattatttggcggattattcgcagcattaggatcattattgttattcggtcgtcgtaaaaaacaaaataaataatacagcttataccaggtccgtgaggcctggttttttatttcaaaatttatgaaatgtatcttatgtttgaggttaaatagtgcaattttttaaaaaatacaacataaatcaacataaatttaattcatctttacattaaaagtacaaacgaataagaaaagcaattaaacacagtatcaaaccatttaaaaaaattgatataaaaaacaaatgaataattaaacattactagaattaatttattcaaaccaaagtgtaaaataacagtcttaaataaataaatttatttaaagtattgtgctttatctaaaaatgtattacgatgggaatacaaatttttatatgtaaaaatattaattttttgcaaatattgatattttaaaggagatttatatgattaacagggataataaaaaggcaataacaaaaaagggtatgatttcaaatcgcttaaacaaattttcgattagaaagtatactgtaggaactgcatcgattttagtaggtacgacattgatttttggtctagggaaccaagaagctaaagctgctgaaaacactagtacagaaaatgcaaaacaagatgatgcaacgactagtgataataaagaagtagtgtcagaaactgaaaataattcgacaacagaaaataattcaacaaatccaattaagaaagaaagaaatactgattcacaaccagaagctaaagaagaatcaactacatcaagtactcaacaacagcaaaataacgttacagctacaactgaaactaagcctcaaaacattgaaaaagaaaatgttaaaccttcaactgataaaactgcgacagaagatacatctgttattttagaagagaagaaagcaccaaataatacaaataacgatgtaactacaaaatcatctacaagtgaaattcaaacaaaaccaactacacctcaagaatctacaaatattgaaaattcacaaccgcaaccaacgccttcaaaagtagacaatcaagttacagatgcaactaatccaaaagaaccagtaaatgtgtcaaaagaagaacttaaaaataatcctgagaaattaaaagaattagttagaaatgatagcaatacagatcgttcaactaaaccagttgctacagctccaacaagtgttgcaccaaaacgtgtaaacgcaaaaatgcgctttgcagttgcacaaccagcagcagttgcttcaaacaatgttaatgatttaattaaagtgacgaagcaaacaatcaaagttggcgatggtaaagataatgtggcagcagcgcatgacggtaaagatattgaatatgatacagagtttacaattgacaataaagtcaaaaaaggcgatacaatgacgattaattatgataagaatgtaattccttcggatttaacagataaaaatgatcctatcgatattactgatccatcaggagaggtcattgctaaaggaacatttgataaagcaactaagcaaatcacatatacatttacagactatgtagataaatatgaagatataaaatcacgcttaactctatattcgtatattgataaaaaaacagttccaaatgagacaagtttgaatttaacatttgctacagcaggtaaagaaacaagccaaaatgtcactgttgattatcaagatccaatggttcatggtgattcaaacattcaatctatctttacaaaattagatgaagataagcaaactattgaacaacaaatttatgttaatcctttgaaaaaaacagcaactaacactaaagttgatatagctggtagtcaagtagatgattatggaaatattaaactaggaaatggtagcaccattattgaccaaaatacagaaataaaggtttataaagttaactctaatcaacaattgcctcaaagtaatagaatctatgattttagtcaatacgaagatgtaacaagtcaatttgataataaaaaatcatttagtaataatgtagcaacattggattttggcaatattgattcagcttatatcattaaagtagttagtaaatatacacctacatcagatggtgagctagatattgctcaaggtactagtatgagaacaactgataattatggttattataattatgcaggatattcaaacttcatcgtaacttctaatgacactggtggtggtgacggtactgttaaacctgaagaaaagttatacaaaattggtgactatgtatgggaagacgttgataaagacggtgttcaaggtacagattcaaaagaaaagccaatggcaaacgttttagttacattaacttacccggacggtactacaaaatcagtaagaacagatgctaatggtcattacgaattcggtggtttgaaagacggagaaacttatacagttaaattcgaaacgccagctggatatcttccaacaaaagtaaatggaacaactgatggtgaaaaagactcaaatggtagttcggttactgttaaaattaatggtaaagatgatatgtctttagacactggtttttataaagaacctaaatataatcttggtgactatgtatgggaagatacaaataaagatggtatccaagatgctaatgaacctggtatcaaagatgttaaggttacattaaaagatagtactggaaaagttattggaacaactactactgatgcctcgggtaaatataaatttacagatttagataatggtaactatacagtagaatttgaaacaccagcaggttacacgccaacggttaaaaacactacagctgaagataaagattctaatggtttaacaacaacaggtgtcattaaagatacagataatatgacattagacagtggtttctataaaacaccaaaatatagtttaggtgattatgtttggtacgacagtaataaagacggcaaacaagattcgactgaaaaaggtatcaaagatgtgacagttacattgcaaaacgaaaaaggcgaagtaattggaacaactaaaacagatgaaaatggtaaatatcgtttcgataatttagatagcggtaaatacaaagttatttttgaaaagcctgctggcttaacacaaacaggtacaaatacaactgaagatgataaagatgcagatggtggcgaagttgacgtaacaattacggatcatgatgatttcacacttgataatggatacttcgaagaagatacatcagacagcgactcagactcagatagcgactcagattcagatagcgactcagacagtgactcagactcagacagcgactcagactcagacagtgactcagattcagatagcgactcagactcagacagtgattcagattcagacagcgattcagactcagatagcgactcagattcagatagcgattcagattcagactcagatagcgactcagactcagacagtgactcagactcagatagcgattcagattcagacagtgactcagattcagacagtgattcagattcagacagcgactcagactcagatgcaggaaaacatacacctgtgaaaccaatgagtgctactaaagaccatcacaataaagcaaaagcattaccagaaacaggtagtgaaaataacggctcaaataacgcaacattatttggcggattattcgcagcattaggttcattattgttattcggtcgtcgcaaaaaacaaaacaaataatacaatatgacccaggtccttgtggcctggtttttttatgattacacatgcaatagatgtatttttcatataaaataaacaataaagatacgtaataaaacttatatgaggcgataatatgaattacattttaggaacaattttagaaagtaaaattactggtgtagaaaaagcacaaataaatagactgaagttgttcaaacaacacggcatatcttcaaaatgtgtatatgttaaatggaatccttattcatacacatatgcgaagcaacatcagattgaaaatgatctgtttacaatgtatgactattttcaaaaagcaatcaattataaaaagacaaagcaagttaactggatacagtattgggaaaagtcatgtaggtacacattgaaatttgtggaaaattcaaatgatgtcagaatatatgatgaagagcaatttataatgtatgctcattttttagataaacagtatcatcaattaaactatgtgaattattttgatcataaaagaagaaaagtaaaacgtgaattgtatgatggaagaggctttttaagttgttctcgaattttaggtgaagggcaacggattgtactcgaaaattactatacacctaatggggaaatcgtcatccaaaaatatttcgacgatataaaggggaaaaacacgctcacaaaggttatcttaaatgaagaccagcatcaacaattttttgatacagaagatgaattagttcaatattttctccatcaattatgtaaaaataatgatcaaatcatattagaccgtcctcatgaattaggaaatgttattgcgggattaaatcaaagtattccagttattgttgtgctccacagtacacatttatccggcaccggtaatgatataaaaagtttttataaaacagtgtttaataatttaacacgttataaagcgattgttgtatcaacagaaaagcaatgccaagatatttcacaatatattgaaaataaaataccagttatcaatattccggttggctacgtggcaaacttaaagtatcaatttgacagcaatcaaaaggataaaaatcatatcatatcaattgctcgcctcgttgaaaataaacaaattaaacatcaaattgaagtgatcaagcaattagtaacaaaacatcccaatattcaattgaatatttatggacatggaaatggtttgttagaatatcgacaacttgtagaagattatcatttatcggaacatgttaaatttcatggttttaagacgcatattaatgaagagattgctaaagcagaactgatgttatcgacaagtaaaatggaaggttttggcttagcaattttagagtcgctttcagtaggtacaccagtgatcagttatgatgtagattatgggccatcagaactgattcaagatggatttaatggctatttagtacctcaaggtgacatcaatcaaatggttgaaaaggtcgaccaattactaaataatactcaaatgatgcaacaattttcgattaatagtatagaatctgcacaacagtacaatgcaactactatcagtacaaagtggcaaaatattttaaactaagtcaaaagaaaaaagcattttcctagaattatctatttaacaaaccacgttcatatgaacttacatgtttagttaaataacataggaaaatgcttttttataaaaataaaggtaaagtacatttatataagacgaacaaattggtcccattgtttaattaacgacgctttactatattgttgcgcttttgccaaactaccttttgacagtcgttgttgtacttcaggatgatcaatcacatatttcactttatcaaatagggcatcttcaccatttttagtaattaaataaccattgaaatctgaagtaattaattcaccaggtccatatttaatatcataactaataactggaacaccatgtgctaaagattcaagtagcgctaaagagaaaccttccatgttacttgttattaaactcaaataggcatcgctatattcttggtctagattgcttaaaaagccacgtaaatatacatgattttctaatccatatttttgtatcaattcatttaattttttactttctgaaccaaaaccatacatatggagttctactttcggtacataagggactaagcgtttaactaattcaatttgctgatgtaattgtttctcaggtgaataacgtgcaacggaaattaatttaacactgcgctggtctagtgtttgaacgggtgtatcaatagagtcactataaccgacgggaatattaatgacaggtatagcataattaatacgtttttcaacatctaatttttgctgttcagtagaaacgataatggcacgatatcgagataaattttcaaacatcgctttatatacatttttaaatggcgatgaatctaatgcatcaatatttttaatgtgtgtactgtgaagcacagctactactgggattgactcaggtgttaagttgaaaataggtgctgtatacacattacgatcactgaaaaataaatccccatgttgatatagttgtttaatgaaaaatgcgcctaattccgtttcattattaaagaaatattgtttgttagcatagtaaacaataattttttgtacttctggtttgccatctttgtatgaaaaatacttttctaattttgtgtcaccttctggattatagaaaaattcacataatgtttgttgtttatcaacaaggattctactacaatttaaaaagccacgcacatcataaaaatcacgttttacttttcgtctttgactatcaaaatgattcacataatctaatatacgatatttaggatcttgaaaatgggcatacattaagaaacgctcttgatcatatattctaaagtcatgactattttcaacatgttttaaagtataatgacattcatcagtccaatatgacaaccagtcaaatggttcattgcgttctaaatatgttgcttcttggaagaaatcatacatattaatatagtcagaactagtaatataattttgggcatttctatataaatatctattccatgacagaaatacacattgcgctggtcttccaatttctttaaataaatttaaacgattaataattgctttctctatcccagttaaattaacacctaaactattacctacaaaataattcatttacaacaccacttatatctattttttataattatatcacataatatttaattacttcttttaagtggaagatgtgtttatttataaaacaacaagttttgatatttataatggtagtagttattcagtcaactacgaccaatatatcattgtagagctttggaaattgatttatgactcaggcacatcaaatgagaagatttataaaagagatatacaactctaggaggtataataaaaacgcgcaactactgttacgcgtttgaattaatcatatgatattatttgcgatactttaatttagcgaaagcatcatgttgatggatagactcttcattacgacattcgatatcgaaaccgtctaaccaatcaaattcaactaagtccgcggcaattaaacgaattaagtcttcgacaaaacgtggattttcatatgcacgctctgtcactcgtttttcatcaggacgttttaaaatagggtatagaattgaacttgcattagcttccattgcatctaaaattttgtttttatagtcatcaactatgtcttgatctttattaatatatgttttaacagtgacaacaccacgttggttgtgcgctgaatattcacttatttcttttgaacaagggcatagcgttgtgacagttgcttcaatagtaagttctttacgtgtaactttatcaccgtcaattgctaatccataagtgacatcggcattaccaactgctttaatatttgtggttggactatagcgatcaaagaaccatttcccagaaacatcaacgcctgccgcattttgtttcatattcgtttgtaaagtgcgtaacacctgataaagtgtattaaattcaagttcaataccattatcatagtgcttttcaacactttcaataatacggctcatattaatacctttttcgtcttttgttaaacttgttgaaaaactaaatgtgccagctgtttgatactggtcaacaagtacagggtacactaagtttttaataccaacttcttctatttcaaataagaaatctttatgtgtactttgtaaatctgtcatttcgttcttagtagtaggtttcgtgccttcgataggatctacggaaccaaagtgtttccaacgaccttctcgtgtcgataaatcaaattcagtcatttttttcctccgttaagatttaaagtgatatgtccaatatggttcgactgttaaaaagctgtgttgtttaccatcgatttcaggacttgctaattgttttaaaaatggacctgtttgagaagcatgtgcttcaaatgccttaattttaagttctttaaaatctgtaatatcattttgaatatcaggctctccaagagcttcggttgcatcattactgaacgcaactaaagttaaacgagggcgttcttctttaggcatgcgttcaaccgttcgaattacagcgtctgctgttgcttcgtgatcaggatgtactgcatatccaggataaaatgaaataatcaatgatggatttgtatcatcgattaaagatttaatcataccatctatatgttcatagggttcaaattcgacagttttgtcacgtaaacccatttttcttaaatcagtaataccaataactttacaagcttcttctagttcacgctcacgaatacttggtaatgattcgcgcgttgcaaatgggggattacctaaatttctgcccatttgtcctagggttaaacatgcgtatgttacaggtatgccttgttggatataacttgctaatgtgcctgcagatgagaaggtttcatcatcaggatgtggaaatattactaatacatgtctttcgtcagtcatgttgatgcctcctctataaattaaatggtcgctcactaatttgaagtgctgcagcgagttgaccttcgtaattaaaacctgcaattaaaaattcatcatgctcattgatctcaaaatgcgttagaccttgtacataaacccaaccaccatttgatagtttaagaccaatgcgataaggttctttattaccaccttttagttgcgcatgcgtatatgttacttgtatgtttcttaaaaatgtaccagcattaaaaacacgttgatcgaaatggttcgcataggccccatttgtcgtttcaacatgcagatacacaggtttatgttcaaaagaagcaagtaaatctataacttcttgttctttaattggttccaacacgttcactccttacactatcaatgtgtttatctttctattttactaaaaactattcaataattgtatacgattgctcaattatttataaattaattttcatgaagagtaattactcaggattacacaatcatacagcattagttttttacttttaaaaatcaaaaatttgttggaatttgaaaagtgttaaacattaaaaatgatgctatattaatggtgtatgaatgaattcataagtttttaaaatgtattaaatttgtggaggcatgtaaacaatgaaagtattaaacttaggatcgaaaaaacaagcatcattctatgttgcatgtgagttatataaagagatggcatttaatcagcactgtaaactaggtttagcaactggcggtacaatgacagatttgtatgaacaacttgttaagttattaaataaaaatcagttaaacgtagacaatgtatccacgtttaatttagacgaatatgtaggtttaaccgcatcacatccgcaaagttatcactattatatggatgacatgcttttcaaacaatatccttattttaatagaaagaatattcatattccgaatggagatgacgatgatatgaatgcggaagcgtcaaaatataatgacgttttagaacaacaaggtcaacgtgatattcaaattttaggtattggagaaaatggtcatattggatttaatgaacctggtacgccgtttgatagcgttactcatatcgttgatttgactgaaagtactattaaggctaatagtcgatattttgaaaacgaagatgatgttccaaagcaagccatttcgatgggacttgctaatattcttcaagctaaacgtatcattttactcgcatttggtgaaaagaaacgtgctgctattacacatttattaaatcaggaaatttctgttgatgttccagccacattacttcacaaacacccgaatgttgagatatatttagacgacgaagcttgcccgaaaaatgttgcgaaaattcatgtcgatgaaatggattgattgcaatgtttaattaagaaatgcctcgggaaaggttccaatagaaagataaaaagcattggaaggatgatttttagtggaattacaattagcaattgatttattaaacaaagaagacgcggctgagttagcaaataaagtaaaagattatgtagatatcgtagaaatcggtacgccaatcatttacaacgaaggtttaccagcagttaaacatatggcagacaacataagtaatgtaaaagtattagcagacatgaaaattatggatgcagctgattatgaagttagccaagctattaaatttggcgcggatgtaattacaatactaggtgttgcagaagatgcatcaattaaagcagctattgaagaagctcataaaaataataaacaattactagttgatatgattgctgttcaagatttagaaaaacgtgcaaaagaactagatgaaatgggtgctgattatattgcagtacacactggttatgatttacaagcagaagggcaatcaccattagaaagtttaagaaccgttaaatctgttattaaaaattctaaagttgcagtagcaggtggaattaaaccagatacaattaaagaaattgtcgctgaaagtccggatcttgttattgttggtggcggaatcgcaaatgcagatgatccagtagaagctgcaaaacaatgtcgcgctgcaatcgaaggtaagtaatatggctaaatttagtgattatcaattaattctagatgaattaaagatgactttgtcacatgttgaagcggatgagttttctacgtttgcgtccaaaatactacatgctgaacatatatttgtagctggcaaaggacgttcaggattcgtggcgaatagctttgcaatgcgcttaaatcagctcggcaaacaggcacatgttgttggagaatcaacgacacctgcgattaagtcgaatgatgtatttgtaattatctctggttcaggttccacggaacatttaagattattagcagacaaagcaaaatcagtaggtgctgacatcgtattaattactacaaataaagattctgcaataggcaatctagctgggacgaacatcgttttgcctgcaggtacaaaatatgatgaacaaggttcggcacaaccattaggaagtttgtttgaacaagcatcacaattatttttagatagtgttgtaatgggattgatgactgaaatgaatgttacggaacaaacaatgcaacaaaatcatgctaatttagaataaataaaagatagtcgataatattatgccattgtgataatattatcgattatttttttatttaaatattaaattatagtataatgtcattaacaaacgaacgggagtgttaatagtgaagtttgacaattatatttttgatttcgatggtacattagcagacacgaaaaaatgtggtgaagcagctacacaaaatgcatttaaagcatgtggtttaacggaaccatcatctaaagaaataacgcattatatgggaatacctattgaagaatcatttttaaaattagcagaccgaccattagatgaagcagcattagcaaagttaatcgatacatttagacatacatatcaatctattgaaaaggactatatttatgaatttgcgggtataactgaagccattacaagtttgtataaccaagggaaaaaacttttcgtggtgtctagtaagaagagtgatgtattagaaagaaatttatcggctattggattaaatcacttgataaccgaagctgttggatccgatcaagtaagtgcatataaaccaaatcctgaaggcatacacacaattgtgcaacgctacaatttaaatagccaacaaacggtttatattggtgattcaacatttgatgttgagatggcgcaacatgctggtgtaccatctgcagcagtaacatggggagcacatgatgcaaggtcattacttcattcaaatccagattttataatcaatgatccatcagaaattaatacagtattataaaatttgttaaaacagagaataccatggttaaaatgcatattcataaatattagattatacatagaaatatttcgctttagattaggaatttaaaataaatatttattaaacattatgaatttttaaagagtgatgtctgattcgttgatcagcttgggacataaatcaatgtcctaggatctataatattatattggcagtagttgactgaatgaaaatgcgcttgcaacaagctttttttcaactctagtcaggggccccaacacagagaatttcgaaaagaaattctacaggcaatgcgagttggggtgtgggccccaacaaagagaaattggattcccaatttctacaggcaatgcgagttggcggggccccaacatagaagctggcggaaagtcagcttacaataatgtgcaagttggggtgggacaacgaaataaattttgtaaaaatatcatttctgtcccactcccaaagtaatgacaaagttattgaagtaaattgaatataaacatttaaatatgatgaggaaagtagtgatagcatatgacttacatgaagttgtgtgctatcgctatttttaattataaatctaatatgttgatcgttcgatgatttaagaattattattgtttaattcaaatgtacgagggtataaaatcattgaatttaattcgataaagtgaaacttttgaacaaacatacttttgtatttatataaaagtttaaattcttataaatttgacaaaactaattaactccgtataattatgaaacatacaagagggagtgtatgaattcatggattttaataaagagaatattaacatggtggatgcaaagaaagctaaaaagactgttgttgcaaccggtatcggtaatgcaatggaatggttcgattttggtgtctatgcatatacaactgcgtacattggagcgaacttcttctctccagtagagagtgcagacattcgacaaatgttgactttcgcagcattagccattgcgtttttattaagaccaattggtggtgttgtatttggtattattggtgacaaatatggacgtaaagttgtattaacatcaacaattattttaatggcattttcaacattaaccattggattattgccaagctatgatcaaattggactttgggcaccaatactattattgcttgcaagagtactacaagggttttcaacaggtggagagtatgcgggggcaatgacatatgttgcggagtcatctccagataagcgtcgtaactcattaggtagtggactagaaattgggacattatcaggttacatagctgcttcaattatgattgctgtattaacattctttttaacagatgaacaaatggcatcatttggttggagaatcccattcttacttggtttattcttaggattatttggcttatatttacgtcgtaagctggaagaatcaccagttttcgaaaatgatgttgcaacacaaccagaaagagacaacattaactttttacaaatcatcagattttattacaaagatatatttgtatgttttgtagctgttgtattcttcaatgttacgaactatatggtaactgcatacttgccaacctatttagaacaagttatcaaattagatgcaacgacaacaagtgtattaattacttgtgtcatggcaataatgattccattagcattaatatttggtaagttagcggataaaataggtgaaaagaaagtatttctaattggtactggtgggctaacattatttagtatcattgcatttatgttattacattcacaatcattttttgttatagtaattggtatatttgtattaggatttttcttatcaacttacgaagcgacaatgccagggtcgttaccaacgatgttttacagtcatataagatatcgaactttatcagtaacatttaatatctctgtttcgatatttggtggtacgacgccattagttgcaacatggttagttacgaaaactggagatccattagcacctgcgtattatttaacagcaatcagtgttattggctttttagttattacattcttacatttaagtacagcaggaaaatctctaaaaggttcgtatccaaatgtagataacgagcaagatagagcttattatgcagaacatccaaaagaagcattatggtgggttaaagaacgtaagaattagagattttaataaaaagtataaatcaatcgtatataagcactttaaagctagtaggttctgctaactttaaagtgctttttaaattgagaactgtaattagccgtaataaagtttttgtatatacataaacccccactgcaatgattatcgcaatgggggaaagaggggacttaaagcatatgtttagctttgaatacttaaaattctcttgctattgaaatgttaggatgtaaatatgtcttagagtattttgtccaacgcaattaatattgagactctaaccttcaatattattatagagaacacaaacttaaatagattgggtgacttatttgtgtcagttattgcgattgcgataacttcttttctctatatacatatagtaacgtcttatctaataaaaaacatggtactacagtatcaaatttatctagggcttaagtttgatttttatcataggtagtatgacctgataaaaatgcttgttcattatataatgttaacaagatgtattttaaagtttacattgagtgagggatattgatgaacgtaattttagaacagttgaaaatacatactcaaaataaacctaatgacatagcattacatatagatgatgaaataattacatatagtgaactaaatgcccgcatcactagcgcagttgaatctttgcagaaatattcacttaaccctgtcgttgctattaatatgaaatcaccggttcaaagtattatttgttatttagctttgcatcgtttacataaagtgcctatgatgatggaaggtaaatggcaaagtactatacatcgtcaattgattgaaaaatatggtattaaagatgtaattgaagatacaggtctcatgcagagtatagactcaccgatgtttattgattcaacgcaattacagcactaccccaatttattacatattggttttacttcagggacaactggactgccaaaagcatattatcgtgatgaagattcatggttggcttcttttgaagttaatgaaatgttgatgttaaaaaatgaaaatgccatagcagcccccggaccactatcgtactcgttaacattatatgcgttattgtttgctttaagttctggtcgtacttttataggacagaccacttttcatcctgaaaagttacttaatcaatgtcgtaaaatatcatcatacaaagttgctatgtttcttgttccaacgatgattaaatcattattgttagtttacaacaatgaacatacaatccaatcattttttagcagtggagataagctgcattcttctatttttaaaaagataaaaattcaagcaaatgacataaatttgattgaattttttggtacatcggaaaccagttttatcagctataacttgaatcagcaagcaccagttgaatcagtaggtatgctatttccaaatgtggaattgaaaacaacgaatcacgatcacaatggtataggaactatttgtataaaaagtaatatgatgtttagtggctatgtaagcgaacaatgtataaataatgatgaatggtttgttactaatgataatggctatgtaaaagagcagtatttatatttaacgggacgacaacatgatatgttaattattggtggtcaaaatatatatccagcacatgttgaacgccttttaacgcaatcgtcgagtattgatgaagcaattataatcggtattccaaataagcgttttggtcaaataggtgtattgctttattctggtgatgtgacacttacacataaaaatgtaaaacaatttttaaataagaaagtgaaacgctatgaaattccatcgatgattcatcatgtagaaaagatgtattacactgcaagtggtaaaattgctagagaaaaaatgatatcgatgtatttgagaggtgaattataatatgaatcaagcagtcatagttgcagctaaacgaactgcatttgggaaatttggaggcactttaaaacatttagagccagaacaattgctcaaacctttattccaacattttaaagagaagtatccagaggtaatatctaaaatagatgatgtagttttaggtaatgttgttgggaatggtggcaatattgcaagaaaagcattgcttgaagcggggcttaaagattcaatacctggcgtcacaatcgatcggcaatgtgggtctggacttgaaagtgttcaatatgcatgtcgcatgattcaagccggagctggcaaggtatatattgcaggcggtgttgaaagtacaagtcgagcaccttggaaaatcaaacgaccgcattctgtgtacgaaacagcattacctgagttttatgagcgtgcatcatttgcacctgaaatgagcgatccatcaatgattcaaggtgctgaaaatgtagccaagatgtatgatgtttcaagagaattacaagatgaatttgcttatcgaagtcatcaactgacagcggaaaatgtaaagaatggaaatatttctcaggaaatattacctataaccgttaaaggagaaatattcaacactgatgaaagtctaaaatcacatattccgaaagataactttggccgatttaagcccgtgatcaaaggtgggaccgttaccgctgcgaatagttgtatgaaaaatgatggtgcagttttattgcttattatggaaaaagatatggcatacgaattaggtttcgagcatggtttattatttaaagatggtgttacggtaggtgttgattctaattttcctggcattggtccagtaccagccatttccaacttactaaaaagaaatcaattaacgatagaaaatattgaagtcattgaaattaacgaagcgttcagtgcacaggtggttgcctgccaacaagctttaaatatttcaaatatgcaattaaatatatggggtggtgcattagcatcaggtcatccatacggtgcaagcggtgcccaattagtgacgcgattattttatatgtttgacagagagactatgattgcatctatggggattgggggaggtctaggaaatgcagcattatttactcgattctaaccagcgattaaatgtgtcattttctaaggatagtgtggctgcatattatcagtgttttaaccaaccttatagaaaagaagtaccaccattaatgtgtgcgtcattatggccaaaatttgatttatttaaaaaatatgcatataacgaactgattttaacaaaatcagcaattaatcaaactcaaaagatagaagtagacacaatatatgtagggcatttagaagatattgaatgccgacagattcgcaatatcacacgttatacaatggctttaacattaactaaaaatgatcatcatgtcataacggttacacaaacttttattaaggcgatgaagtagagatgaagtttaatgagatatggataaatgaatatttggcgctcgtaaatgatgataatccaatacataatgagattgtgccaggacaattagtgagtcaaatgatgctgatggctatgtcaatagaggcgaaccagtgtcaaattaactacgttaaacctattttaataaatgaaaatatcgaattcattgaagaacacgagcaagaaatgatagcaattaatgacgatggagagattaaaataaagatttctttaagcacaaaaaataaccgatattagctgcatgaacgcatattaattaggagatgaaaggacagctaatatcagttatgtattgttattattattgggaacagagataaatataggctacgtttctttctttgcacggggatgcattaatctaaaataataataacaactatatcaatgtttaataaattctggattattggaacgattagtcaatttaactaactttcatatgatctatatcgtcttgtaataaagagagcaatttgaatatttcagtatcactaaatgaatcgtcacatttaattgaaacatgctgaaacgttttggttataatttcataaactggtgcgccttcatggtgatactgtcgataaataatcataacctatattacctcctttgctactctatggttatattataaataacatttttatgtgtgacatcaaccttaagtatcaactttttatcagacatagaacgtatgatttactaagactatttatgtatcatgttttaaaaggaatatatttttataaagtcgttgagaagttatttttaatttcaaaaaaatggcaggattagtagaacgggataaaacattatgtttaaacatgggcataataaagttccgaaaggatttggtttttataggaaaactgaagcgtgacactgtaaatgaatagtatatacatatgttgaaataaaactgcctataacgaggacttacaatacttatttgcccaatttaactgtgaaaatcaaacaagtatttaataactaaaataaccacaccgaaagtgactttattgtgtactgagccccaaagttagactttgaaagctaactttactggcgcacagcaatgacactcaaatcataaggtgtggttaatctattttttatgaacgaagcattaaacctctgttacttcaacatcgatatgttcaatacggttgtatgcaccgtgatccacaggaccaacaaaatcattcattttccaaccgtttttaatagcagaagcgacgaaagctttcgcgctaatcacagcttctttcggtgacttaccgttagctaaatatgcagttgttgccgcagcaaatgtacaaccagcaccatggttataactttgttggaacatgtctgtagttagttgataaaatgtttgaccatcatagtataagtcatacgatttatcttgatctaaagctttgccacctttaatgatgacatgctgtgcgcctttatcaaagataattgttgcagcctttttcatatcttcaattgaatttaatttacctaatcctgataattgacctgcttcaaataagtttggtgtcactaccgttgctttaggtagtaaatatttaatcatcgcctcagtatttccagggttaagcacttcatcttcgcctttacaaaccatgacaggatctactacaaagtattgtgcattagatgcctcatatacttctccagcacgtttgattatctcctcagtacctaacatacctgttttaatagcatcaggtccgattgataaagccgtttcaagttgcttttcaaatacatccataggtaatggtgtgacatcgtgtgaccatgtatctttatccatagtaacgatggcagttaaagcgaccatgccatacgtatctaattcttggaacgttttcaaatctgcttgcatacctgcaccagcacttgtgtcagaaccggcaattgttaaaactttctttaaagccattgagcttcactcctacataataatattgtattcatcatatcatttttaacctaattgaaaaatattaagcattcaatatttgatgattgttgaaatgaatcattcatactattgtaacttttgaaaatgtcattcactttagttaagtgtgatatgttaaaatatgtcctgaggtgagattgaatggaatggtcgcaaatttttcatgacataacaacgaaacatgactttaaagctatgcatgattttttagaaaaagaatattcgactgcaatcgtataccctgatagggaaaatatatatcaagcgtttgatttaacaacgtttgaaaatatcaaagttgttatattaggacaagacccgtatcatggtccaaaccaagcacatggattagcattttcagtgcaacctaacgcaaaattccctccatctttacgtaatatgtataaagaattagcagatgatattggatgtgttagacaaacaccacatttacaagattgggcaagagaaggcgtcttgttattgaatacagttttaaccgtaagacagggtgaagcaaattctcatcgtgatattggttgggaaacatttactgatgaaattattaaagcagtgtctgattataaagaacatgttgtctttattttgtgggggaaacctgcacagcaaaaaataaagcttatcgatacatctaaacattgtattataaaatcagtgcatcctagtccactgtctgcatatagaggattctttggatcaaaaccgtattccaaagcgaatacctatttagagtcagtaggaaaatcaccaattaattggtgtgaaagtgaggcgtagatggtgaatagagaaactttaatagcacgaattgagcaagaattagtacaagcagagcaggcgcagcatgaccatgactttgaaaaacatatgtatgccatacatatattaacatctttatatgcttcaacatcaaatacaccacatattggtgaacaacaaatgaatcgtcgtattgctaaccataatcaaatgccacactcacaaattacgcagccaacacatcaagtgacagctgctgaaatagaagcgatgggtggtaaagtaaatacgcattcagcacatcatcataataagtcatattcacaaccttcaaaccaacaacaaagattagcgacagatgatgacattggcaatggtgaatccatatttgatttttaaaaagcaacaatgaaacataattacttaatagcttgttaattatgtaggttaatgatcaagacgcatatacttttattcgagtgttcggatttaaatatttattaatactgaattatataaggagaggtagcaatgaaattatttattattttaggtgcattaaacgcgatgatggctgtcggaacaggtgcatttggtgcgcatggtttacaaggaaaaataagtgatcactatttatcagtatgggaaaaagcaacgacgtatcaaatgtaccatggcttagcattattaattataggtgtaattagtggcacaacttcaatcaatgttaactgggctggctggttaatatttgctggtattattttctttagtggatcattatatattttagtattaactcaaattaaagttttaggtgcgattacgccaattggtggcgtattgttcatcattggatggataatgttaatcattgcgacattcaaatttgctggttaaattttaaaattttagattacctatgtaactaaacattaaatttttaataaaaataatcaagaaaaagagttacaaactcatcttttgggtatagaataccttcgaggtgagtttttatttatggaaaaaaagaataagcaaatagatagaggcgatttaaaacaaaacctatctgaaaaatttgtatgggcgattgcatatggttcatgtatcggatggggcgcattcatcttaccaggagactggattaagcagtcaggtccgattgcagcatcaattggtattgttattggtgcattattaatgatattaattgcggttagttatggcgcattagtagagagatttccagtatcagggggcgcgtttgcctttagtttcttaagtttcggcagatatgtgagtttcttctcatcatggtttttaacttttggttatgtctgtgtcgttgctttaaatgcgaccgcattcagtttactagttaaattcttattgccagatgtcttaaataatgggaaactatacaccattgcgggctgggacgtttatattacggaaatcattattgcgaccgtattactacttgtattcatgctagtaacgattcgtggcgcaagtgtatctggatcattacaatattatttctgtgtggcgatggtaatcgtcgtattattgatgttctttggttcattctttggtaataattttgcacttgaaaatttacaaccgttagctgaacctagcaaaggatggttagtgtctattgtagttattgtatccgtggcaccatgggcatatgttggatttgataatattccacaaacagcagaagagtttaactttgcaccaaacaagacatttaagcttatcgtgtacagtttattagcagcatcattaacttatgttgtcatgattttatacactggttggttatcaacaagtcatcaaagtttaaatggacagttgtggttaacaggtgctgttacacaaacagcatttggttatattggattaggtgtattagcaattgcaattatgatgggtatatttactggtttaaatggattcttgatgagttcaagtcgcttgttattttctatgggacgttcaggtattatgccaacaatgtttagtaaattacatagtaaatacaaaacaccatatgtcgcaatcatattcctagtaagtgtgtctttaattgcaccttggctaggaagaacggcattgacttggattgtagatatgtcatctacaggtgtatccattgcctactttattacatgtttgtctgctgcgaaattattcagttataacaaacaaagtaatacgtatgcaccggtttacaaaacgtttgctattatcggctcatttgtatcattcattttcttagcgttgttattagtgccaggttctcctgcagcactgactgcaccatcttatattgcattacttggatggttaatcatcggtttaatattctttgtgattcgatatcctaaattgaaaaatatggataatgatgaattaagtcgcttgattttaaatagaagtgaaaatgaagttgatgatatgattgaagaacctgaaaaagaaaaaactaaataataaaagaatcgcacaatataccttcttaattcggaggcgtatcgtgcgattttttgtagcataaattgacatttaaggcgagatagttaaaccatatatataattgctaagagtttgggctgagccatttctaacaatatttataatcgtttaaaagatttcacgaacccagaaacaattaatttggaaatttggtcggcgaataataaacctaatgcgatggctcctgcaataagtgtaacctctagcatggtattgattgctgtactgaaatttaataatactaaatttttcgttgcatcgtaagctaatccacctggcactaatgggataatacccgtcaccataaaaatgattgcaggttctttttgtttacgtgccatatagtgacttaataaacctagggcaagactgccgaagaaactagagtatatagtgtgcacattaaagccgttgaagaataaggtgtaaaccatccatccacacgtaccaacgaaaccacatgatagatataattttctaggtgcatcaaaaatgacgcagaagaacattgaagctaaaaagctaaagataaagtttaagatccaaaacatagtctgatactcctatactaaaattaatacgctaccaacgccagcaccgatgccaaacgcagtaaccaaggcttctaatgatttcgttgtgaacatcaacatgtgtccaccaaataaatcttgtattgcgtttgttattaatacaccaggaacaataggcatgactgccgcaatgataatagttgccaagtcacctgttggaataagtgtatgtccaataacggcgataatcccaataactaatgaaccaatgaattctgggataaactgtgcgtgtaatttacgatctaaaatctcagtgactaggtatcctagactacctgctaatatcgcagttaaaacatcaatcaatctaccaccttgtaaatataagaaactcattgcaatcattgctgcagcaaaacctttaaagggaagactgctgtcacgcttagcaacatatattttttcaagttgcgtttttgcctcggctaaagaaatttcattatttgtaatttgacgcgaaattttattagcttgagaaatttttattaagtttgtatctcgagaggtaattctaaatattctaggaaacgattccgaatgtaacgtaaactggatgacagtgtttgtaacaaagctgttactttcactataaccaagtttttttgcaatacgtgtcatggtatcttctacacgcgtaccttctgcaccagattctaatagtatgcgagcagcaagcatgacaacatctttgataagtacctcttgtttgtattcttctgaatttatgtccatttcatcaccattgtttataagaatttaatacttattatagtttatacactataaaataaccacatgagctttttgataagttgttattgattttaaaaaactaatatttgatactattgtaataataatcatcggaatttttagtggttaaaattctcttgaagtataaaaaggaaaaaatattgaaaaaattcgacaaaaatatgtttcaaatatttcaaataggttaaaataatattagttaaccattacaaaaattgtatagagtagcgactgtataatttctattgaggttaacgtttatatgtagtgatagtagttaaagttctcccaaggaagactactcgggtacactttgctatgagcaaagtgtactttgttattgataatacattagcacatatatataagtttaaacatacagatttcaactatttaccaaagcacgtcttatgtatacgggaatatactgaagataaacgaaaaattccaagcttaaaccgataagcttggaattttttattaatttataaacgtaccaatgtattaagaaatcgcaaagaattgatcgaattcgtttgtgttaataatatgtcctacaaagaaactaccgaattcaccgtatcgtgctgttgtttcatcaaagcgcatttcgtatacaatttttttgaattgtaatacgtcatctgagaacaatgttacgccccattcgaaatcatcaaaccctacagaaccagtaataaattgtttgattttgccagcatattttctaccaatcataccatggtcatacattaatttttggcgttcttccatagttaacatgtaccagttataagtttcattacgacgcttgttcattggatagaaacaaatataatcagaatgtggtaattctgggtataatcttgctttgatatgagggttctcataaggatcttcatcagatttaccagctaaataattgctcaattcaatgactgatacatatgaatatgtagggattaagaagtcagcaatgcgcaatttgttaaattcattttcaatatgatttaaagacttcatttcaggacgtaagaaccataataacaaatctgctttttgaccagttatattataaatagcttgatcaccagattttaatgatcttacagttgctgtattttctaaaaatgattgaaattcagtgacaagtgcatcgcgttcgtcctttggaactagacgtaatgatgcccaatcaactgcataaaataaatgtagactataccaaccatctaatgtttcggctgcttgactcatgtttatcgctccttttcaaaaatcatcagttctttataaattttatcataaagcaaaggggtaacgataaaattatgattacaaattggtgacgtggcattatgaaataaaatggcgtataattataccgtgaatgattaataagatttatattacaggaggacattatggctgatttattaaatgtattaaaagacaaactttctggtaaaaacgttaaaatcgtattacctgaaggagaggacgaacgtgttctaacagctgcaacacaattacaagcaacagattatgttacaccaatcgtgttaggtgatgagactaaggttcaatctttagcgcaaaaacttaatcttgatatttctaatattgaattaattaatcctgcgacaagtgaattgaaagctgaattagttcaatcatttgttgaacgacgtaaaggtaaagcgactgaagaacaagcacaagaattattaaacaatgtgaactacttcggtacaatgcttgtttatgctggtaaagcagatggtctagttagtggtgcagcacattcaacaggcgacactgtgcgtccagctttacaaatcatcaaaacgaaaccaggtgtatcaagaacatcaggtatcttctttatgattaaaggtgatgaacaatacatctttggtgattgtgcaatcaatccagaacttgattcacaaggacttgcagaaattgcagtagaaagtgcaaaatcagcattaagctttggcatggatccaaaagttgcaatgttaagcttttcaacaaaagggtctgctaaatcagacgacgtgacaaaagttcaagaagctgtcaaattagcacaacaaaaagctgaagaagaaaaattagaagcaatcattgatggcgaattccaatttgatgctgcgattgtaccaggtgttgctgagaaaaaagcgccaggtgctaaattacaaggtgatgcaaatgtctttgtattcccaagtttagaagctggtaatattggttacaaaattgcacaacgtttaggtggatatgatgcagttggtccagtattacaaggtttaaattctccagtaaatgacttatcacgtggctgctcaattgaagatgtatacaatctttcaattattacagcagcgcaagccttacaataacgatggatttaacgagtaaatattttaatggcgtcaactggcgatatatcgaccattcttctggattagagcctatgcaatctttcgcattcgatgatacattttgcgaaagtgtgggcaaagatatatcagataatgttgtgcgtacttggattcatcaacatactgttattcttggtattcatgattcaagattgccgtttttaaaagatggcattgattatttaacgaatgagattggttataatgccattgttagaaattctggcggcctaggtgtcgttctagatcaaggtgtattaaatatatcgctgatgttcaaaggacaaacagaaacaacgattgatgaagcgtttactgtgatgtatctcttaattagcaaaatgttcgaagatgagaatgttgatattgatacgatggaaattgaacattcttattgcccaggaaaatttgacttaagtatcgatggtaagaaatttgcaggcatatcgcaacgaagagttagaggcggtattgctgtacaaagttatctttgtgttgaaggctctggttcagaacgtgcattgatgatgcaaacattttatgaacatgctttaaaaggtgaagtgactaaatttaaataccctgaaattgaaccatcttgtatggcctcattagagacattgcttaacaaaacgattactgttcaagatgtaatgtttttactattatatgcaatcaaagatcttggcggtgtattaaatatgacgccaattactcaagaagaatggcaaagatacgatacgtattttgataaaatgattgaaagaaacaagaaaatgatagaccaaatgcaatagttaaatatttaacagcccctttcaagttatcgtttggggctgttatttttgacagtatccataaatagcataaatatgttattgtcctaatatttaaattgaacatcattaaattaaaagtaatgatatgattgaaataataaatttaataagaaaatttcatgttttacgtattaaatagattgagaatagggtatatataatgcgtatgactatgaaagaaacgaaccttctattgaaatgttctaatactttagtagtaaatctatatattccaattattatttgtagtattatagttagggtggaaaattataaattgtagggctattttataaaaagataaagaatctgaaatatcactcgataagatttaaactttgaagtaaacgaaagttagttttatactaatcaagttaagtcaagtataaattcaaattaaagattatacataatatgaataatgtgagataaagactgcaatgaaatttaacgcgaatgcgtatgcaacttagaatatgatgtcttttactaataaataaaaacaatgaatcaagtataggataaatataaaaggtgatattgacatgacaagaaaaggatatggggaatcgacaggtaagattattttaataggagaacatgctgttacatttggagagcctgctattgcagtaccgtttaacgcaggtaaaatcaaagttttaatagaagccttagagagcgggaactattcgtctattaaaagcgatgtttacgatggtatgttatatgatgcgcctgaccatcttaagtctttggtgaaccgttttgtagaattaaataatattacagagccgctagcagtaacgatccaaacgaatttaccaccatcacgtggattaggatcgagtgcagctgtcgcggttgcttttgttcgtgcgagttatgattttttagggaaatcattaacgaaagaagaactaattgaaaaggctaattgggcagagcaaattgcacatggtaaaccaagtggtattgatacgcaaacgattgtatcaggcaaaccagtttggttccaaaaaggtcatgctgaaacgttgaaaacgttaagtttagacggctatatggttgttatagatactggtgtgaaaggttcaacaagacaagcagtagaagatgttcataaactttgtgaggaccctctatacatgtcacatgtaaaacatatcggtaagttagttttacgtgctagtgatgtgattgaacatcataactttgaagccttagcggatatttttaatgaatgtcatgcggatttaaaggcgttgacagttagtcatgataaaatagaacaattaatgaaaattggtaaagaaaatggtgcgattgctggaaaacttactggtgctggtcgtggtggaagtatgttattgcttgccaaagatttaccaacagcgaaaaatattgtaaaagctgtagaaaaagctggtgcagcacatacatggattgagaatttaggaggttaatgcgttgattaaaagtggcaaagcacgtgcacatacgaatattgcacttataaaatattggggtaaaaaagatgaagcactaatcattccaatgaataatagcatatctgttacattagaaaaattttacactgaaacgaaagtcacttttaacgaccagttaacacaggatcaattttggttgaatggtgaaaaggttagtggcaaagaattagagaaaatttcaaaatatatggacattgtcagaaatagagctggcatcgattggtatgcagaaattgaaagcgacaattttgtaccaacagcagcagggttggcttcatcagcaagcgcatatgcagctttagcagcagcttgtaatcaagcgctagacatgcagctgtcagataaggatttgtcgagattggcgcgaatcggttcgggttctgcatcacgtagtatttatggtggatttgcagaatgggaaaaagggtatagtgatgagacgtcatatgccgttccacttgaatcgaatcattttgaagatgaccttgccatgatatttgttgtgattaatcaacattctaaaaaggtacctagtcgatatggtatgtcattgacacgaaacacatcaaggttttatcaatattggttagatcatattgatgaagatttagctgaagcaaaagcagcgattcaagacaaagattttaaacgccttggtgaagtaattgaagaaaatggtttgcgtatgcatgccacgaatctaggatcaacaccgcctttcacatatcttgtgcaagaaagttatgatgtaatggcgctcgttcacgaatgccgagaagcggggtatccgtgctattttacgatggatgcgggtcctaatgtgaaaatacttgtagaaaagaaaaacaagcaacagattatagataaattattaacacagtttgataataaccaaattattgatagtgacattattgccacaggaattgaaataattgagtaaggaagagataaaatgattcaggtcaaagcacccggaaaactttatattgctggagaatatgctgtaacagaaccaggatataaatctgtacttattgcgttagatcgttttgtaactgctactattgaagaagcagaccaatataaaggtaccattcattcaaaagcattacatcataacccagttacatttagtagagatgaagatagtattgtcatttcagatccacatgcagcaaaacaattaaattatgtggtcacagctattgaaatatttgaacaatacgcgaaaagttgcgatatagcgatgaagcattttcatctgactattgatagtaatttagatgattcaaatggtcataaatatggattaggttcaagtgcagcagtacttgtatcagttataaaagtattaaatgaattttatgatatgaagttatctaatttatacatttataaactagcagtgattgcaaatatgaagttacaaagtttaagttcatgcggagatattgctgtgagtgtatatagtggatggttagcgtatagtacttttgatcatgaatgggtcaagcatcaaattgaagatactacggttgaagaagttttaatcaaaaactggcctggattgcacatcgaaccattacaagcacctgaaaatatggaagtacttatcggttggactggctcaccggcgtcatcaccacactttgttagcgaagtgaaacgtttgaaatcagatccttcattttacggtgacttcttagaagattcacatcgttgtgttgaaaaacttattcatgcttttaaaacaaataacattaaaggtgtgcaaaagatggtgcgtcagaatcgtacaattattcaacgtatggataaagaagctacagttgatatagaaactgaaaagctaaaatatttgtgtgatattgctgaaaagtatcacggcgcatctaaaacatcaggcgctggtggtggagactgtggtattacaattatcaataaagatgtagataaagaaaaaatttatgatgaatggacaaaacatggtattaaaccattaaaatttaatatttatcatgggcaataaatgatttggtaggggagcaatcatctaatttaattagaagataaatgctccattttttattgccagccgtgttacgtatcttgaaaaaaatattaaaaagagtaaaatagatagagttaacgaaaaaattaatgaaatcgacgatatagatatgataaagaaaggtgggtagcaatatgaaaaatacattccttatttgtgatgaatgtcaggcagtcaatattagaacgttacaaaagaagttggaaaaattagatcccgatgctgaaatcgtgataggttgtcaatcttattgtggacctggacgccgaaaaacattcacttttgttaataaccgcccactggctgcgcttactgaagaagaattaatcgaaaaagtttctcaacaattaaagaaaccacgtgatcctgaagaagaagagcgtttaagaaaacgacatgaagaacgtaaacgtcgtaaagaagaacaagatagaaagcttaaagaaaaattagaaaagcgaaaagcacaacaataaaacctgatggcagcatcattcaatgcgtgccaccaggtttttatgttttgtctagaaattaaataaatcattaaatgattcggccatcgtaggatgcgtataaatattatctcgtaatacggtatatggaatattttgatcaatcgcaagtttaattatattaattaattcttcagattgcttaccatataatgtagcacctaaaatcatattattttcattattaatgactactttaaataaacctcttggatcattgttaattttgtgacgaggtatagcacttactaaaagttgatgttcagtgtaatcataatgttgagcggcagcttctttactagttaatccaacacgtgataatggtggatctataaatactgtataaggcacgctgcctctattgtcagtcgtacgtgactgattaccatataacgctgatttgataattcgataatcatctaaagatatatacgtaaattgaagtccgcctttaacatcacctgcagcataaatatgcggcacagttgtttgaagatgagcattgactttaatttcgcctctgtcgcctaattcgatatcagtattttctaatgctaaatccgtattcggtttgcgtccgatagccaaaagtactgcatctgcctcaaagttaccaacgttagtatggactgttgtatgatgatcgtcagatgacaattcagtcgtttcaacatttgtatacaatgcaatgcttttattttctaagtcagtaatagcatgtgcaacgacatcttgatcttcgcgtggcataaatgattcaccacgttctaatactgtaaccttactacctaaattcgcaaacattgaagcaaattctaaggcgatataaccgccacctacaataacgaggtgtttaggttgatagctaatgtttaataaacctgttgaatcaaagacatgtttagcttgatcaaggcctttaatgttaggaatgacagaggtagcaccagtattaataatgatatgaggtgcagtaatactatcggcgatatcgccatgttgatctaataaattcacttcagtattagatttaaactgcgctttaaaatccagtacatcaatgttactgtcgtctgctaataagtggtaatttttattgtttagcgcattgacaacatcgtttttacggttataacttgcttcaaaggttttgccttctaatccatcatgtacaagtgttttcgaaggtatacatcctatattgatacaagttccaccatacattttcgaagattgttcgataactgcgacgtgttgacctgttgatgcagcgtatttcgctaaagttttaccagctttcccaaatcctattacaattaaatcatatgttttcatgacataaatcctccttttgaatgtcttcaatgacatctttgattgttttttctttataaaaattaataatgatattctgttcgtcttgttgataatgtgacatggtagttgcaatattacgagcaatttgacagtgactgccttcgtcgccagtaaatagtcgtgtgtgatgttctttctctaagacaaaatgtttatataatgttgctaaagagacatcagcgctacgatcatttgctaaatatccaccatctttaccccgtattgtgttaatcatttttaaatcgacaagttgagtcgtcacgcgtcgtaattgaacaggatttaaacaagttaattctgctaatgaactactattgaatttttctgaatgatgcttagttaaaaaagctaacacatgcacggcaatgttaaattctaaattcaatgtttctcacctcgtaattgtaactgtattaattacaattaaaaatcattttgctcaatgtgtcaatacttatgtttgaaaagtgttgaactaggagtgtttatagtgatgatttattgtttgaaggtttttgcattaacggcgagattgcacaattgaaattttagttatgtatgaactgatagatatgaaatgaatattgaaaatgagggcaataaaattttgaatgatgatgttgtgtgattttgtaaacttgttcgtattttagagacgttttgatatttcgcatgatgaggaagtatttttaacaactgatgacatattttaatagtaaatatattttgagatattaatatatttaatgttaaggatgttgtcgcaataaaattaaaatattgaaagataatttttattgattaattgcgaatatacaaagacaccattatatccatatgctaaaataagaaaaaaggcgacatgttatctcaatttacctgcatctagacccctttacataagaaataatcatcgccgagttttaaaattttacaactttgtagatgtaaaaagcatttgattttaaatagtttgaaaatcatatatttttgaaaaaggagcatgccgatgagtattgacatgtatttagacagatctcgaaaccaagcttcaagtgtgggtaatttgagtcaaacaatgaattcaaattatgatgcgttggaaaaagcaattactcaatttatcaatgatgatgcgcttaaaggtaaagcgtatacgtcagctaagcaattttttagtacggtgttaattccattatcaacaagtatgaaaacattgagtgatttaacgaagcaagcttgcgataattttgtgtcacgttatacgagtgaggttgatagcatatctttaaaagaatcagagcttgaagaagatatcagatcattaagtcaacaaattacgcgatatgaaaatttgaataacaatttgaaaaagcatgcttccgataatcagcaagccatttcatcgaaccaacaaataatacgaacattaggtcaacaaaaacatgaattagaagagaagctacgcaaattgcgtgagtttaatcaaaaatcaccagaaatatttaaagaagttgaagaatttcaaaaaattgtccaacaaggacttacccaagcgcagaatttttggaacttttcaacaaatcaatttaatataccttcaggtaaagaacttgattgggctaaagcaagtcatgaaaaatatttgaaagttgctatggggaaaattgaacaaaaagcagagaaagaaactttaaataaagcagactttgctgttataaaggcatatgccaaagaacatccagaagacgatatcccgaaaagtataatgaaatatataaatgacaataaagatagtattaaacgagatataggattagatatcacgtcaacacttttagagcaaggcggtataaatgcaagtaaattcggtgtatttatcaatacagcaggtggagtcaaaggcccagccggtccaaattcatttgtggaagtcaaacgtacatcaggtaatgtgtttatagaaaatggtagtaaatttgctaaaggcggaaaatatctaggtaaaggtgttgcaggtgtaggttttggtataggtatgtatgatgaccttgcaaatgatgataaaacatttggtgaggcgttgtcgcataatgctttaactacaggaataggtattggcgcaggtgcgggtatgactgctactatcgcgttatttgcaagtaatccagtaggatgggctgttataggtggctttgtgtttggttcggtttcgacaatgcttgtagattgggcttatcaaaataataaggctggtataaaagataaagcagactgggtaggacataaactagacgatggtatcgatgttgttaaaaaatctacagaaaaagccgtagatagtgttggtgaagctacaaaaagtatttctaatcatttaaaccctatgaaatggagctggtaaatattgctatgtgaatctaaagttatcaacaaaaaccctaagtatagagttattaaatatggtgatgaatatttaatgattgatttagtaagtacctggttaactttatttcttcctatgattaattggttaattccaaaaaaatatgtcaaaatcagtaaaaaagaatttgacgatttaaacattgtcaaacctgttaaaaataaagctttttggccagttgcaggtagtactattttgttcggagttacgtttagaaaatatattccttcacttaatattcaattagagaaaaacatggtgattgtaatatgttgtgcaatatttctgggtgttttaatactttttttatttctgaatcgtaagctaagattggaaatttataataataactctagtaaagggaaaataattttatttccttcattaaaaaacttttgcttcacaatattttattattttttatttggcggtctttcaataatggctctaagtatgttattaactttaaatcctcaaaatataataggctttattggttggttggtaatgactgcaggtttctttctgttaaacatgtcatcgattattgacaaaaaaatttatgtattatctaaaactaacacggtggaaaaatgatggtttagctggatttactgcgggttctgtttcgtcattacttgtatattggaccaatcaaagaaatgaatttggaataaaaggtaaaaacgattggataggacataaactagacgctagtatagatgctgtagaaaaatctgcagaaaaaacagtagatggtgttgaaaatgtcatggtgaagcttcaaaaagtatttctgatcatataaatcctatgaaatggagctggtaaaaagtgctatgcgaatctaaaattatcaataaaaacgcaaaatatcgaattattaaatataatggtgaatacttaatggtcgatataataagcacttggattagtttattttttccttttattaattggttcatccccaaaagatacgtcaaaattagtagagaagagtttgaaaatttaaatattgttaaacctgctaaaaagaatgttttttggccagttgcaggtatctctactttattcgcagttacattaagaaagtatacgcatttacttgacactcaacttgataaaaaattagttattgccatatgttgtatcacatttatagggattttaacattttatgtacgcctaattaaaaaatcatctttaaatatttataatactaaaaataaaagatcaaaaattgtcttaatacctacactaaaaaatgtttgtttcacattatttggatatattttatttggcggattgactatgttattcctagatgcactattatcaatgagttatcaaaacataatagtatattttgcttggattgcagttataatgggtttttttctagtgaatatagctttaattatagataaaaacattcatgtcatacttaaaaattaagtggtagtaataaattcagattaaagatatgcaaataacaatgaataaaatttttaatgatagtaagttgataatattttaatgtcttttgaagtatcgaaaaatgtattacacataaaattaaagggatgtggagacattgctttgcgaggtaatagctatatacaaaaatcccaaatatagaattattaaatataatgatgaatatttgatggtgaatataataaataattggttagttttattcattccactgcttaattggttgacaccaaaaagatacatcaagatcagtcaagaagaattagaaagtttaaatactttcaaacctgctaaaaacaatgcattttggccagcattaggtagttcagttttatttagtgtgacttttagaaagtatatgcctttatttaatgttagattggaaaaaacaatagtaatagccatattttttgttgtatttcttggtattttatttttctacctaaatttaaatcgtaggctagcattaagtgtttttactatgaataaagaaaaaagtcagaaaatgatattgctacctaatttaaaacattttttctttataatatttgcatatttatatttcggtggtttttcatttttcactttatatgccctgataactatagatgttcaaaatataattatatttatctgttggggtgcagtaactatgtttttcttttttataaacattgttcccattggcattaaaaaagctcatgtaatacttcttaaaaaagctgaataataaatgagttttttaaatctaaaattattaaatttaatataaaaatttgactcatagatagaatgaataaaaatccgaaatatagaattatcaactacaaagatgaatattttataatggatatcccatgttaatattaacagttttaatttctttgttatgcaaatcaaaacattatagtatttctaattgaatttgtaatggatttaatgttgtcgttcttaaatgatttttcaatttctgatacaaaaaagtacatgtaatttaaaggctaacgagcaatcgcgctatgtgaatatcaacttaagcaatacttattttaactgagttctacataacatttctctaatacaccgcctaaattcaaaccctaattctaacatttggaagttgtattaaatcatgatagtgtgatagtggaaaagttataaagataaggagctgggtctaatgaagcaatttgtaaacttaggtaaatctgatgttgaagtgtttccaatcgcacttgggacgaacgcagtaggtgggcataatttatatccgaacttagatgaagaacaaggaaaagaagttgttcgtcaagccattaatcatggtattaatttattagatacggcatatatttatgggccagaacgttcagaagaattggttggagaagttgttaaagaatatccgcgagagcaaattaaaattgctacgaaagggtctcatgaatttgatgaaaatcaagaagtacatcagaacaatcaaccggaatatttaaaacaacaagttgagaatagtttgaaacgtctacaaactgattatatcgatttatattatattcattttccagatgacaacactccgaaagatcaagcagttgcagcattacaagagcttaaggaacaagggaagattaaagccattggtgtatcaaatttcacattagatcaacttaaagaagcaaataaagatggttacgttgatgttgtacagttagaatataatttattgcatcgcgaaaatgaggcagtattacaatattgtgttgatcaccaaatcacatttattccatatttcccattagcatccggtattttagctggaaaatatgatgagaacactaaatttagtgaccatcgtactacacgtcgtgattttaaaccaggtgtatttgaagaaaatgtgcgtcgcgtaaaagctttggaaagcctagctgcagcacatcaaacttcaattgcgaacattgtattagcattttatttaacgagaccagctatcgatgtgattattcctggtgcaaaacgtgcagaacaagtcattgaaaatattaaagctgcagatatcgttttatcagatgatgagattcaatatatcgatgaactgtttccaattgaagactaaatgaattgtatttaatggtgacatatgtatctaattcatcatgaattagccccgtatcacaaacgactttatataaggcatgacgaaatttcgtcaaatttatataaaagttgtaagcgttttactattcggtaggcaaagcttatgatagtataattaggtaacgaaaaacacagatatttattaatcaaaagtgaggttaggctaaaatgattactgttttgtttggtgggagtagaccaaacggtaatactgcacaattaacaaaattcgctttgcaagatttagagtatcaatggattgacgtgacacaacatcagtttaaaccgatacgtgacgtgagacatacaacagagactattacttcatatgacgatgactatttgccgattctagataaaatattggctagtgatacaattatttttgcatcaccagtgtattggtatagcatttcagcaccattgaaagcatttatcgaacattggtcagaaacattacaagataaacgatatcctaattttaaggcacaaatggccgaaaaggattttagagttattttagttggtggagattgtccaaaaataaaagcgaagccagcaattacgcaaatgaaatatagtttagactttttaggtgccactttaaatggttatattattggaactgctgaaaagcctggtgacatcatgaaagacaactatgccttagcacgtgcaactgagtggaatagtatattgcaataagacatacctcatactaaacgaagtgattttttgcttcgttattttttatttttaattttaacggaaaatataaatatataaattgaatagacaatcattgtttattaagtattgagcaagttgtggtataatgccgttattaaaacttgttaataaggggagaaagtcatgttcaaggtaagacaagtaactgaaaaagatgttgttcaaattagagatgtcgcaactaaagcttggtttaatacatacttaaatatatacgctgcgacaacagttaatcacttgttagaagcttcatataatgaacatcatttaaagaaaagacttcaagaacaattattcttagtcgttgaagaaggtaatgacatcgttggctttgctaactttatttacggtgaagaattatatttatcagctcattatgttaaaccagaatcgcaacatacaggttatggtacagcattgttaaatgaaggattatcacgttttgaagataaatttgaaggtgtttacttagaagtagataataaaaatgaagaagcagtagcttactataaagagcaaggttttacaatcttacgctcttatgagccagaaatgtatggcgaaaagttagacttagcacttatgtacaaagcattttaagtaaattaaatattatattaaacgaaaaggaggggaataatgactaacgcatatgtagatttaaaattagtagaagaaaaagtttttaaagacccgatacatcgatatattcatgttgaagatcaattgatatgggatttaattaaaactaaggaatttcaaaggttacgtcgaattagacaactaggaacactgtacctatcttttcatacagcagaacatagtcgctttggacattctttaggtgtgtatgaaatagttagacgattaattgatgagtcatttattggtcatgatgcatgggacaataaagatagaccgttggcattatgtgctgcattattacatgatttaggacatggtccattttcacatagttttgaaaaaatatttaatacagaccatgaagcatacacacaagcgattattactggagatactgaggtgaatgctgtattacgtaaagtatcgcctgagtttccaagagaagttgcggaagtaattaataaaacgcatcataataaattggtcatttcgatgatttcttcacaaatcgatgcggatagaatggattatttacaacgtgatgcgtatttcacaggtgtatcatatggtgcttttgatatggaacgtattttaagattaatgcgaccttctaaagatgaagtactaatcaaagaaagtggtatgcatgcagttgaaaactttattatgagtcgttatcaaatgtattggcaaatttatttccacccagttagtcgtggtggagaagtgctgcttaataattgtttgaaacgcgcaaaacagctttataatgaaggctatgaatttaagttgcatccacatgattttattccattttttgaagagacagttacgattgaacaatatgttgaactcgatgaagcggtagttacgtattatttggaaaaatggacaaaagaagatgatgccattttaagtgatttagcaagtcgatttattaatcgagacttatttaaatatattccatttgatggctcaattattacaatatcagaactgcaagaactgtttgaagcaggtggtattaatccagattattattttgtgagtgaagcattttcggatttgccatatgactatgatcgacctgggtcaaatcgcaaaccgattcatttattaagacaagatggtacgattagagaaataagcaatcaatcattagtcattcatagtattacaggtattaatcgccaagactataaattatattatcctagagaaatggttgcaaagattaaagataagacaattagagaagctattgaaaatttgattaatgagcttaattaaacagggctaaaattgttatcgttaaatatggaggttatatcattgtctgagaaaaaaggctttaattttaatatcataaaaaatgaccctctagatggtcataaaggtacaaatattggttcaattagcttagacaatattgcaccagtttttatcgatgttgctaacaaagaagcatttattgatattggaggcatgcatgctcgcgccaaagttgaaaaaggcgtgaaatggattactgataaagctgctgttgaaggcgatgaagctaaagaatattggttgtgttgggtaacaacagaacgtaatgaacaaggaccatattatgctggtttaacagcgtgctatttattagtgaataaagcaattcgtcgtggttataaaagtatgcctgaacatgttaatatgatggataaatcaatgaaacatcatattatcattgatcaaattggtgacgagaataaagctattttaaaagactttttaatgaaccatgatgaaggtatgtggaagcattcttctgatgctttacatcaagcatttaattaaatattagaaactaaaatttcccaattaatctataaagatatgattcatttctcaatgacgacgtaaatcgtgaggtgaaaataaagtcttagattgattgggagtttttttaatttttttgaaattaaattaatctgtagttaataaaaaatttgaataactgacacatttttttgatcatagctatatactttgtgaattaattcacattataataagagtgaagataagagtattataaattatctttaaataaatatatgtgaagtaaaaattacacgttagcatatcgattatgtcatttcttttaacatattaactagggaaacgttaaaagttaacggttgatatctaactaaaaacaaagtcacagtagtatattttaatctggcgtctattacaaataaaaattacatctataattattcgttttcatttttgaaagtaatcgccaattaatatcatacatactggagtgactataaggaggacattattatgagagcagcagttgtaacgaaagatcacaaagtaagtattgaggacaaaaagttaagagctttaaaacctggtgaagcattggtacaaacggaatattgtggcgtttgtcataccgatttacatgttaagaatgctgattttggtgatgttacaggcgttactttaggtcatgaaggtattggtaaagtcatcgaagttgcagaagatgtagaatcattaaaaattggagaccgtgtgtctatcgcttggatgttcgaaagctgtggaagatgtgaatattgtacaacaggtcgtgaaacactttgccgtagtgtgaaaaatgctggttatacagtagatggtgcaatggctgaacaagttattgttactgcagactatgctgtgaaagtacctgaaaaattagatccagcagcagcgtcttctattacatgcgcaggtgtgacaacttataaagctgtaaaagtaagtaatgtaaaacctggacaatggttaggtgtttttggtataggtggtttaggtaacctagctttacaatatgctaaaaacgttatgggggctaaaattgttgccttcgatattaatgatgataaattagcattcgcgaaagaattaggtgcagatgctattattaattctaaagatgttgatccagttgcagaagttatgaaattaactgataacaaaggattagatgcaacagtggtaacttcagttgctaagacgccatttaaccaagcggttgatgttgtaaaagctggtgcaagagttgttgccgttggtttacctgttgataaaatgaacttagatatcccaagattagtgcttgatggtattgaagtagtaggttcacttgttggtacaagacaagacttacgtgaagcgtttgaatttgctgctgaaaataaagtaacacctaaagttcaattaagaaaattagaagaaatcaatgatatttttgaagaaatggaaaatggtactataactggtagaatggttattaaattttaaaaatataaaatgactttatagataaagaaggtagtgctctgaacactatcattataatcaaacacgaggttttcatgaaagatagtgaaaatctcgtgttttttggttttgaggtgttgtttgtattttataaaatggcttacatatatcaagcgttgattaagtatggaattgttaattaattgaacctatttagctttaagaaggcataacaagatgaccttattttatgctataatatttctattatgcgaagattaaggtgagtagtaaattggataaaaaagtaagtattcatacaaagcaagtgttgaaacagcacaacgaaaaagaaaaatttgaatttactactgaaggaacttggcaacaaaggcaatctaactttattcggtacgtagaacaaattgaggatgcaacagttaatgttacaataaaagtggatgatgatagcgttaagttgattcgtaaaggcgacattaatatgaatttgcattttgttgaaggacaaacgacaacaactttttacgatatatcggctggacgaattccactagaagttaaaacattacgcattttacatttcgtaagtggagacggtggcaagttaaagattcattatgaattatatcaagataatgaaaaaatgggttcttatcaatatgaaattaactataaggagataggcgaatgaatattattgatcaagtgaaacaaacattagtagaagaaattgcagcaagtattaacaaagcaggattagcagatgagattcctgatattaaaattgaagttcctaaagatacaaaaaatggagattatgctactaatattgcgatggtactgactaagattgcaaagcgtaatcctcgtgaaattgctcaagcgattgttgataacttagacactgaaaaagcacatgtaaaacaaattgacattgctggtccaggattcattaatttttacttagataatcagtatttaacagcaattattcctgaagcaattgaaaaaggtgatcaatttggatatgtaaatgaatcaaaaggtcaaaatgtattgcttgagtatgtttcagctaaccctacaggagatttacatattggtcatgctagaaatgcagcagttggtgatgctttagctaatattttaactgcagctggctataatgtaacacgtgaatattatattaatgatgctggtaatcaaattactaacttagcgcgttcgattgaaacacgtttctttgaagctttaggtgacaatagttattcaatgccagaagatggctataatggcaaagatattattgaaataggtaaagatttagcagagaaacaccctgaaattaaagattattctgaagaagcacgtttgaaagaatttagaaaattaggcgtagaatacgaaatggctaaactgaaaaatgatttagcagagttcaatacgcattttgataattggtttagtgaaacatctttatatgaaaaaggtgaaattcttgaagttttagctaaaatgaaagaattaggttatacgtatgaagctgatggcgctacatggttacgtacaactgattttaaagacgacaaagacagagtattaattaaaaatgacggtacatatacgtatttcttaccagatattgcgtaccacttcgataaagttaaacgtggtaatgacattttaatcgatttatttggtgctgatcatcatggttatattaatcgtttgaaagcatctcttgaaacgtttggtgtagatagtaatcgtttagaaattcaaatcatgcaaatggttcgtttaatggaaaatggtaaagaagtgaagatgagtaaacgtactggtaatgcgattacattaagagaaattatggacgaagttggcgttgacgctgcacgttatttcttaactatgcgtagtcctgatagtcactttgattttgatatggaattagcgaaagagcaatctcaagacaatccagtttactatgctcaatatgcacatgcgcgtatttgttcaattttaaaacaagcgaaagagcaaggaattgaggtagctgctgcgaatgattttacaacgattacaaatgaaaaagcgattgaattgttgaaaaaagtagctgatttcgaacctacaattgaaagtgctgctgagcatagatcagcacatagaattactaattatattcaagatttagcttctcatttccataaattctataatgctgaaaaagtgttaacagatgatactgaaaaaacaaaagcacatgttgctatgattgaagcggtcagaattacattgaaaaatgcattggcaatggtcggtgtaagcgcacctgaatcaatgtaagaacatttatatacactccaacgtagagtttctccaaagatactttgtgttggggtgttttttattaggtatgtgacatattggggaatgcttagtatgtgaataaggttaagaggaacgcagttggatgctaaggtacaactgcataagagccccctaatcgctaaagctcaaggggagtaaaggaatacagttggtttgcttgcgcagcaactgcataagagcccctaatcgctaaagctcaagggggttaaagaatacagttggcttgcttgcgcacaactgcataagagcccctaatcgctaaagctcaagggggttaaaggaatacagttggcttgcttgcgcaacaactgtataagagcccctaatcgctaaagctcaagggggttaaaggaatacagttggcttgcttgcgcacaactgcataagagcccctaatcgctaaagctcaaggggctctaaaaggaggatgtaaatgttaggaactgatgaattgtataaattgttatataggcatatgggacctcaaaattggtggcctgctgataatgacattgaaatgatgttaggtgcaattttagttcaaaatactagatggcgaaatgcagaaattgcattgaatcagattaaagaacacacgcattttaatccaaatcatatattagaactacctattgaaacgttacaatcattgattcattcaagtggcttttataaaagtaaatcactgacgattaaaacattattaacatggttagcacgacatcatttcaattatcaagagattaatgagcgatataaagctgaattaagaaaagaattattatctttgaaaggtattggaagtgaaacagcagatgtcttacttgtttatatattcggacgtattgaatttattccagatagctatacaagaaaaatatatgataaattaggatatgaaaacactaaaagttatgatcaattaaaaaaagtagtcacattaccaaatcattttacaaatcaagatgctaatgaatttcatgctctgttagatgtatttggtaaacattactttagagataaagatataaagaattatgattttttagaaccttactttaaaaagtaaacgctgtgaagttagatagatgagtttatatgaaatataaaaaataatttactattttcttttagtatgtggacttatataataaatagaagcatataaagaaaaaaagttgtttgtttgtgcagtaactgcataaatccctctaatcgctaaaggtgaagaggaacgcagttggatgctaccgcacaactgtataaaagcctctaatcactaaagctcaagaagattaaaggaacgcagttggatgctaaggcacaactgcataaatccctctaatcgctaaagatgaagaggaacgcagttggatgctaaggcacaactgcataaaagcctctaatcactaaagctcaagaggctttaaaaaggagatgtgataatgtgaagaaatcgttaattgcttttattttgatttttatgcttgttctgagtggctgtggtatgaaagataatgataaacaaggtagcgatgataatggctcgtctaaatcgccgtaccatagaattgtttcgttaatgcctactaatactgaaattttatatgaattaggattaggtaaatacatagttggtgtttcaacggttgatgattatccaaaagatgtgaaaaagggtaagaaacaatttgatgctttgaatctaaataaagaggaacttttaaaggcaaagccagatctaattcttgcgcatgagtcgcaaaaggcaactgcaaataaagtattgtcatcattagagaaacaaggcatcaaagtagtgtatgttaaagatgcacaatcaattgatgaaacttacaacacatttaagcaaattgggaaattaacgcatcatgataagcaggctgaacaacttgttgaggaaactaaagataatatcgataaagtcatagattcaattcctgctcatcataaaaaatcaaaagtatttattgaggtttcatcaaagcctgaaatatatacagcagggaagcatacatttttcaatgatatgttagaaaaattagaagcccaaaatgtttatagtgacattaatggttggaaccctgtaacgaaggaaagtattattaaaaagaacccagatatattaatttcgacggaagctaagacaagatcagattatatggatatcatcaaaaaaagaggtggattcaataaaattaatgctgtcaagaatacacgtattgaagttgtaaatggtgatgaagtgtcaagaccaggtccacgtattgatgaaggattaaaagaattaagagatgcaatttatagaaaataaaccattctaattatgccccttattgctacatgtagtaataaggggtttttaaaatatatttagtgaatgatagcaacgcgagtatgtgattgctataatgaatgtaattatcgatgaaagaaaagagaatgctatgacatttaataaagtattattgagctggatagtcatattgattataacaactagcatatatctattttggcagttgggggatatcaatgatgtatttaaccagtctattttaatcaatgttagattaccgagattattagaagcattgttgacaggtatgatattgactgttgcaggccttatatttcaaacagttttaaataatgcattggcagatagctttacattaggattggcaagcggtgctacatttggttcaggattagcattatttttaggattatcaacgttatggattcctgtattttcaataacatttagtttgataacattaataactgtattagtcattacgtcggtattgagccaaggctatccagttagaatcttaatattaagtggtttaatgattggtgcattattcaattcacttctatattttttgattttattaaaacctcgcaaattaaatacaattgccaattatctgtttggtggttttggtgatgcagaatactcaaatgtatccataatagcaatcacatttatcattgcactgtttggtatatttatcattcttaatcaactaaagttattgcaattaggagaactaaaaagtcagtcactaggcttaaatgttcaattgattacatatatcgcgttatgtgtagcttctatgataacggcgataaatgttgcatatgttggcatcattggattcattggtatggtgataccacaactcattagaaaatggcagtggaaacaatcattaggaagacaattggctttgaatattgtaattggaggacaaataatggttatggcagattttattggtagccatatattgtcaccagtacaaataccggcaagtattatcattgcattaattggtataccagtgttattttacatgctaatatctcagtcgaaacggttacactagcacatgacatttgctaaaataaaaataactataaacataaagagggcataagcgatggatttgaatcaaattaaagcagttgtatttgatttagaaggtacgttgttggacagagttaaatctcgagagaaatttatcgaagagcaatatgaacgatttcatgactacttaattcatgttcaactagcagattttaaaaaagcatttattgagctagatgacgatgaagataatgataaacctgatttatataaagaaatcattaaacgtttccatgtagataggctaacttggaaagacttatttaatgattttgaaatgcatttttatcgttatgtatttccttattacgatactttatatacactagaaaagctatcgcaaaaaggctttcaaattggtgttatcgcaaatggtaaatctaagattaaacaatttcgattacattcacttggtttgatgcatgttattaattatttatcaacatcagaaacagttggctttcgtaaaccacatcctaaaatttttgaagatatgattgatcaactaggggtattacctgagcaaattatgtatgttggcgatgatgcgttaaatgatgtagctccagcacgagctatgggcatggttagtgtatggtataaacaagaagatgctgaaattgaaccacttgaagaagaagttgattttacaattacaacagtggaagaattattaaccattttaccaataaaaattgataataaaggagaaaattatggatctatttactagaaaagatggaacatcgatacattacagtacattaggtgaaggctatcctatcgtattgattcatactgtacttgataattattctgtgtttaataaattagcagcagaattagcaaaatcatttcaagttgtgttaattgatttacgtggacatggctattctgataaacctcgtcacattgaaataaaagatttttctgatgatattgttgaattacttaaatatctatacattgaagaagttgcatttgtatgccatgaaatgggtggaatcattggtgccgatatttcagtacgttatcctgaatttacatcatcacttatgttggtaaatccaacatctattgaaggtgaattaccggaagaacgtttatttagaaaatatgcccatattattcgaaactgggatcctgaaaaacaagataaatttttaaataagcgtaagtattatcgtccgagaaaaatgaatcgattcctcaaacatgtcgtagatacaaatgaaatatcaactaaagaagaaattcaagcagttaaagaggtattcaaaaacgctgatatttctcaaacttatagaaatgtcgtagtaccgacaaaaattattgcaggagaattcggtgaaagaacaacaagattagaagctaaagaagtagctgatttaatcccaaatgcggactttgaagtatatcaagaatcaagtgcattcccatttgttgaagagcaagaaaggttcgtcgaagatacagcttcatttattaacaaacatcacgatgaaaagcatgtttaattttaagtgataagtgaaatataaaagtagtaattattatttgtaatataattgtaatatgactgttgttttagaaatgattgttgtataatggttgtgagcacaagacgatataaataaaaggagagagtgcttatgaaaaagctactaacggcaagtataattgcatgttctgttgtaatgggagtaggcatagcgaacactagtgccgaagcagcaagtggcaactctattgatactgttaaacaattaattaagggtgatcattcattagaaaatgtgaaaattggcgaatctattaaagatgttttaactaagtacaaaaatccgatgtattcttacaatgaagatggaactgaacattattacgaatttcatactaaaaaaggtatgttattagtaactactgatggtaagaaaaacaatggtaaagtaactcatatttcaatgatgtataatgatgctaatggtccaacatatcaagctgttaaaaattatgttggcaaagcagtaacacatacggaatatagcaaagttgctggtaattttggatatattgaaaaaggcaaaacgacttatcaatttgcctcagcaccaaaagataaaaacataaaattatatcgtattgatttggaaaaataataattaaattaatcgtgcttaaccgacaagttaaatcgcaatacttgtcggttattttattacatgccataatacagtgaatataattttttatgatttgcgaaggggatattaaaccaatacaataaataaagatgtttcattttaaaggagtactaccaatgcgtataaacgataaaattttactagaaaatatagaagattactttaatcataaaggtttatcaccgcatttgattgatgatattaaagagaaagtaattactgatataaaaaattctgaaaagaaagatcaagattatattgaatataaaagaaaatctccagcacaaatcatattaatgattcaaaggaatttgtttgctttacaaatgaatccagttattttctttattataaacttcattctcatatcctatttatatgataaacagtatgttcagtttcaagctattactggaatgagtctattttattgtttagtgatttttccaatgactattgttgtatacctaagggtgtcgcaaaagaattacttgcgtagtaataaaatagaaatgattatgggtacaattatcgctatcatatccttgttattaattatattacaagcatttaatattacttggggcgttataccaattacaaattttggacatcaatttttctttttcattggtattattttagtaattgccggcatattttataagcgacttgagttttcgggaatcggcttattattttgtcaaaaaaccgtcgatgcaatgattcataatccacaatcagcccagattttttcattaattatatggatattattagtagttctagttatatatttcacaattagattatcttcacgtacaagattataaatatgataaaactattcacttgattaattgtattaattgagatgaatagtttttttattgttggaataactttttgtaatttataaataatttaaaaaaattgtttataaaatggaagcgtatatagaatgaaggttgggtatatagtttattgagggaggtgtcacaatgaataaagtcacaattaatcctcaaatccaattaacttatcaaattgaaggtaaaggggatcctataatattacttcatggattggatggtaatttagctggatttgaagatttgcaacatcaactagcatcatcatataaagtacttacttacgatttaagaggtcatggcaagtcttctaaaagtgaatcatacgatttaaacgatcacgttgaggatttaaaaattctaatggagaagttaaatattcatgaggcacatattctaggacatgatttaggtggggtagttgctaagttatttacagataaatatgcttatcgtgtaaaatcattaactaccattgcatcgaagaaagatgacttaatacacagctttactcaattgttaattcaatatcaagatgatatagcgggttttaataagtctgaagcgtatattcttttattttctaaattgtttagaaatcaagagaagacgatgaaatggtatcaaaaacaaagaatatatagcattaagtctgaggatgatagtgcggtggcaattcgttcattaattttgcataaagatgaacctatgtatttaaaaaaacgtacatgtgtacctactttgttaattaatggggaacatgatcctttgattaaagataagaatcattttaaattggaagcgcattttttaaatgtaacgaaaaaaatcttcgaacattcaggacatgcaccgcatattgaagaaccagaagcatttatgaattattatttaaattttttagaaaaagtaaaatagaaaatgatatgggatagaaatgataaagaaccactgatgatttattaagtagtggttctttatcattagacactgctaatgtgtactttaaaataggaatactaatttctgaagaaatgtatttctttatcgttgtccgccaacttgcacattattgtaagctgtctttcagtcagcttatgtgttggggccccgccaacttgctttgcccgtagaatttcttttcgaaattctttatgttcgaccccgcaaacataacattttatcacctagaacattgattgatgcctcattcacatgattttgcatgaaatttttatgatgcgaatgcatattgtcagataatcatgtaatgaatacacgcgatttatacataaattctctatatttagaaaaaaagacataaaaaaaggaagtttaatagaatgtatcatctatcaaacttcaccaaattgcgctaaacaaaattatagttcaatttcgttgtttgcttcagtgattcgtttatttactcgactcaataatgattcgatttttttacgttgttgtgcattaacaagaattaatacagttctttcatcatgctcattacgttttttatcgaagtaatcttcttgagataaaattttaactgctttaacaacttgtggttgtttgtagtttaaatgattaataatatctttaagatagtattctttctctttgttttcgctgatgtatgtcaatacagcgaattcttcaaagctaattgaaaattcctttttaattaaactttttaatttgtcagcataagtgaccattgataacaactcaaagcaatcattgatttttgtaattgccatgtttaaaacctccctatttgatgcatcttgctcgatacatttgcccgataatatattgatatctaatctttatttattatagatatgttagtcataattttgcattaaataagttttattaaatatatttaatgctctattatttagttaattataactaattaaaaatgagaagtaaacaaaaaagtgtttataaaacaaattattcattagacacagtgattgtatttctgggttagcatttggtttagtcaaaaatatcagcattttttataatttaccttaatttaatcgtcaatacaaggtaatttatttaatgaaacgatttagcgcaattaaatgtttcgatattcaatgtgtgtctaaagagattctttgttatagcttaactcttccaagttaacttcttctactatttatacccatttttcagaattttatcactaaaaatgaaaaatttttataatttttttaatttagtaattctcagtgcagttttaatgatacgaaaaacacattaatttagtgattaaaaccaatctatagcacgttaaagtgtctatacgttattccgattgataacgggtaacaaataatagaaagtacgataattgattatgcattaaagcacttttatttttcaaactcgactcaatgaattataaaaagttgtgcattttgacttatttttaattaattgaataaccaactatgaaatattagcacgaataacataatttttgctattaatttggtataaattattaaaaaacaacattaatttaggtcttaagaatgagttgagtgtctaatttgctaaattaaaatttgttgtgtcaaagaatactacctaaatcaacgcttttctaaagatttttagattacaaaaaaatagcttatcacttttaaaaataattacaagttaaaatgataagctaaaagttaatttaaaataatcttaaaagtataatgcctgtcaaaatgcataatagaccaatagtttttctggatgtcattgctattttaggtgaaccaaataatccaaagtgatctatcaatatgcccattagaatctggccaaacatcccaataagtgttgttaatgctgcacccatatgaggcattaagataatgttagctgttacaaaagccatgccaagtataccgccagtaaaatagataggttttaatttaccgaattttaaatgacttgtttttagttttaaagaacgattaaaaatagcggttaaaatcaacagcgttattgacccaattgtaaatgaaactaatgatgcaaaggctggtgaatgagtatgacttgctaaagcactattaattgtcgtttgaataggtggaaagaaaccaaaaataaatcctaagagaagccaaaacagtaaatacttttgatcagttagtaataaattattcttgttaaattgattcattgtgatgataccaacaattaatagtagtactccaattgctttaattaaattaaaatcatgaactgttgcaccaaataatccgaacgtatcaataatgacacccattataatttggcccgcaactgttgcaattacagttaatgttgcacctaattttggcaataacaataaattgccagttaaatagccaacaccgagtaatccgccaacgaaccaagtatagttgaatgtttgattactaaaaaagtgtaatgagaaaacgtcaggatttataaaaatatttaagacgattaaacaaattgttccaactgaaaatgaaatgaatgaagtatagaaaggcgatttagtatacagtgatagtcttgaattgacagatgtttggataggaataagcattccaactaggacaccaatgatatagaaaagaagcatatgaataaagtctcactttccaaagttaataataaaatcatatgtatacattatcattatagagaaaatatacaactcatttacaataatgttgaaaaaaacaggacattaacacaacaaaatcaccctagacaatcatgatgaaagtccagggtgttagtatttatactaaattaattgcgctttctttatatctatttcttatcttcaaataaaacagttgttgttttatcaataatttgagcagaatgtactttggtgatagtaccactatttgactttataatatttaaatctactaacgcattcatactatcacgtgcaacttgctcggtcactacgttgtttaattgtggtaattgcagttttacaggcttgtctagtgaagatttaaaacttaattcaagtgttttagtcatgaaagtgtcctcctgattaaattgatacagatttgatgacttcgatgttgttgtatgtttctccagtaagtcgctcgataagtttgctgaatgttttaatttggtcgtttgatgcatcagggttaatgttggcgaatcgacgcttaaattctgtttgtttgccgttagcgtctacttttgtaaatgataatacaatagtgatgtggtttattttactcatattttaaaacctcctttcacactatatatcgaaataaaataataaaatggctaaatttattttctatgtttaaaatctataaaaaaggcaatagatatatgtaactaaaatataaaatagctatgattaagacacttaaagcaaggggaggttgagtaatgaataaagtagaagcgattaaatttaatgatgatattgttaaaatgtatgaagcgctcaagataaaatctgaacgtgactatttattctttaagttagctatacatagtggattgaaagtatcagaattattaacaattacagtctctcaagttaagagactaattgaaaagtgtacgttatcagaaatgtgtaaagcacattttcattcgttgattaaaattaaattaccagaaacattatcgaaagaactacttcaatatatagaggacaggagtctttcgaatgaagacgttctttttcaatcactacgaacaaatcaagtattatctagacagcaagcatatcgaattattcatcaagcatcaattgaagctggcatagagaatgtaggactaacgacattgcgtaagacatttgcatatcatgcttatcaaaaaggtatacctataccagtcattcaaaagtatttagggcatcaatctgctattgaaacactaaattttatcggtttagaaaatgagtgtgaacatagtatttatatttcattacaattatagaaacaaaggaggctaataatgagtttggtttatttattaattgccatacttgtgattatggcgatgatacttctaatgtctaaacgtagagcattggctaaatatgccgggtacatagcattgattgcacctgtaatttcatctatctattttatgattcaaataccatcagtagctaaactgcaatatctttctacctctattccatggattaagacattagatattaatttagatttacgtttagatggtttaagtttaatgttttctcttattatttcacttattggaattgcagtattcttctatgcaactcaatatttatcctctcgaaaagacaatttaccaaggttttatttttatttaacgttatttatgttcagtatgattggtattgtattatcagacaatacgatattgatgtacattttttgggaattaacgagtgtatcatcatttttattgatttcatattggtataacaatggtgacagtcaatttggtgcgattcaatcatttatgattacagtatttggtgggttggcgttattagttggttttattatgctgtatatcatgacaggaacgaataacatcactgacatattaggacaagcagatcatattaagaatcatggattgtttatgcctatgatttttatgtttttattaggtgcatttacaaaatcagcacaatttccatttcatatttggctacctagagcaatggctgcacctacacctgtaagtgcttatttacattcagccacgatggtaaaagctggtatctttttattacttcgatttacaccattattaggtcttagcaatatgtacatatatatcgtcacgtttgttggtttaattacaatgttatttggttcaatcacagctttaaaacaatgggatttaaagggaattctagcgtattcaacaatcagtcaactaggaatgattatggcaatggtcggtatcggtggtggatatgctcaacaccaacaagacgcaatagcatctatttatgtatttgtgttatttgcagcattatttcatctaatgaatcatgccatctttaaatgtgcacttttcatgggagtaggtattttagatcatgaagcaggttcaagggatatacgaattttaagtggaatgcgtcaactatttcctaaaatgaatctagtcatgacgatagcggctctatctatggctggagtaccatttttaaatggatttttaagtaaagaaatgtttttagatgcattaacacaaactggacaattatcccaatttagtttgatttcaatgatagctatcgtgtttgttggtgttattgcgagtgtttttacattcacatatgcactatacatggtaaaagaggtattttggacaaaatatgattctaaggtttttactaaaaaaaatatccacgaaccatggttgtttagtttaccatctcttatattaatggtgctagtacctgtaatcttttttgtaccaaatatatttgggaaggggattatcgttccagcattaagagctgtatcaggtggtaatcatcaaattgatcaattggcaccacatgtttcgcaatggcatggatttaacataccgcttcttttaaccatcatcattattttattgggtagtgtactagcaatcaaagtagattggaaaaaagtgttcacaggtaaaatcagacagatttcagtttcaaaaagctatgagatggtatatcgacattttgaaaagtttgctacgaagcgatttaaacgtgttatgcaagatcgtttaaaccaatacattattatgaccttaggcatatttatgattatcattggatatggttatattcgaattggactaccaaaagtccatcagttacatgtttccgaatttggaccgttagaaattatattagcaatcgtaactgtcacaattggtatttctttaatttttatacgtcaacgactgacaatggtaattttaaatggagtcatcggttttgttgtgaccttattctttatagcaatgaaagcccctgatttagcattgacacaacttgtggttgaaacgattacgacaattttatttattgttagcttttcaagattacccaacgtaccaagatctaacgctaacaaaaaaagagaaataattaaaatttctgtatcactcttgatggcacttattgttgtatcattaatttttattacacaacaaacagatggtttatcatcaatatcagacttctatttaaaagctgacaaactaacaggtggtaaaaatattgtaaatgcgatacttggtgactttagagcattagatacattgtttgaaggtttagtattaattattactggattaggtatttacacattattaaattaccaagataggaggggacaagatgaaagagaatgatgtcgttttaagaacggtcacgaaactcgttgtatttattttattgactttcggattctacgtcttcttcgctggccacaataacccaggtggtggctttataggtggtttaatatttagttccgcgtttattttaatgtttctagcttttaatgtcgaagaagtattagaaagcttaccgatagattttagaattttaatgattattggtgcattagtttcatctattactgcgataatgccaacattttttggaaaaccttttttgtcgcaatatgaaacaacattgacactaccaattttagggcacattcatgtaacgacaataacactgtttgaattgggcattttgttctcggttgtcggggttattgtaacggtgatgctgtctcttagtggaggtcgatcatgaatttaattttattactagttataggatttttagtatttataggaacatatatgattttatcaatcaatttaattcgtattgtaatcggaatttcaatatatactcatgccggtaatctcattatcatgagtatgggaacgtatggttctagtagatcagaaccattaataactggtggaaaccaattgtttgttgatcccttgttacaagctattgtactaactgcaatagttatagggtttgggatgactgcgtttttacttgtacttgtttatagaacttataaagtaacaaaagaagatgaaatcgaaggcctaaggggggaagatgatgctaagtaacttattgattttaccaatgttattaccattcctttgtgccttaatccttgtatttttaaaaaataatgaccgtatttctaaatatttatacttaggtacaatgactatcaccacaattatttcattaatgctattaatttatgttcagcgtcaccgtccaattacgctagactttggaggatggtcagcgccctttggtatacagtttttaggagattctttaagtttaataatggttacaaccgcttcgtttgtgattactttaattatggcatacggatttgggcgtggcgaacataaagcaaatcgttatcacttgccatcgttcatattatttttaagcgttggcgtgataggctcttttctaacatcagatttatttaatttatacgtcatgtttgaaattatgttactagcgtcatttgtactcattacacttggacaatctgtagaacaattacgtgctgcaattatttatgttgtcttgaatattattggttcatggctattcttattaggtataggtttactttataaaacagtaggtacattaaacttttcacatattgcaatgcgtttgaatgacatgggagataatcgcactgttacaatgatttcattaatcttcttagtcgcatttagtgcgaaagcagcgctggtcctttttatgtggctaccgaaagcctacgctgtgttaaatactgaacttgcggcattatttgcagcgttaatgaccaaagtgggcgcttatgcattgattcgcttctttacattattatttgaccaacataatgatcttatacatccattgctagcaactatggctgctataactatggtcatcggcgctataggtgtcattgcttataaagatattaaaaagattgcagcttaccaagtcataatctcaataggatttatcattttaggtttaggaacaaacacgtttgcaggtattaatggtgcaatattttatttagtaaatgatattgttgtaaaaacattgctattctttattattggtagtttagtttacattactggttatcgacaatatcaatatttaaatggtttagcgaaaaaagaaccattctttggtgttgcatttattataatgatttttgctattgggggcgtaccaccatttagtggttttccaggaaaagtacttattttccaaggtgcattacaaaacggcaattatataggactcacgttaatgattattactagtttaattgctatgtacagcttgtttagaatacttttctatatgtattttggagataaagatggcgaagaagttcattttaagaaaatcccacaatatcgtaaaggtattttaagtattttagtagttgtggttatcgcaatcgggattgcagcgcctgtgctgttaaaaataactaatgatgcaacagagcttaatacgaacgatcaattatatcaaaagcttgttaatccacatttgaaaggagaggaataaatgaatcaaattgttttaaatattatcattgcattcttatgggtattatttcaagatgaagatcattttaaattctcgactttcttttctggatatttaattggtttaattgtcatttatatattacacaggtttttcagcgatgatttttatgttagaaaaatttgggtagctattaaatttttaggtgtttatttatatcaattaataacatctagcattagcacgattaattatattctttttaaaacaaaagatatgaaccctggattactttcatatgaaacaagactaacaagtgactgggcaataacatttttaacaattttaattattataactccagggtctacagtaatacgaatttctcaagactctaaaaagttttttattcatagtatcgacgtgtcagaaaaagaaaaagatagtttgttaagaagtattaagcattatgaagacttaatattggaggtgtcgcgatgatacaaacaataacacatattatgattattagttcactcattatttttggaattgcattaatcatctgtttatttagattaatcaagggacctacaacagcagatcgtgtcgttacatttgatacaacaagtgctgtcgtaatgtcaattgtgggtgtgttaagtgtacttatgggcagcgtttctttcttagattcaatcatgctcattgccattatatcttttgtaagttctgtttcaatatcacgctttattggtggggggcatgtgtttaatggaaataacaaaagaaatctttagtcttattgctgctgtgatgttgttgttaggtagttttattgctcttattagtgcaataggtatcgtgaaattccaagatgttttcttaagaagtcatgctgcaacaaaaagttcgactttatccgtgttattaactttaatcggtgtattaatttattttattgtgaatacaggatttttcagtgtgcgtttattactatcacttgtttttattaatttaacttcacccgtcggcatgcacttagtcgctcgcgctgcttatcgcaacggcgcttatatgtatcgaaaaaatgatgatcacacacatgcatcaatattattaagttcaaatgaacaaaactctacagaagcattacaattacgtgctaaaaaacgagaagagcatcgtaagaaatggtatcaaaacgattgaagtgttggctaaattattaagcataacaatgcttttgaagatttgttttcaaaattaattattaaaagagtactttgaaattggttagtcgattttaaggtgctcattttttgtattataagttaatgttgttatgtgaaagcaagttgtttatttatacaaacaattagtgataaaataaaattaaataattgcaaatttaagtactgcaatcgtagacatatatctatattaaagtgcttttgtggtctctaactcaatttatcctctaaagtataattacaacgagatgtgatacttaattttcaattaaacaatactttttagagaggtgaaagtttggaaatatttgaaacaattcttatatttatagctgttgtgatactaagttcgtttgtccatactttcatacctaaagtacccctagcatttatacaaattttcttgggcatgttactatttattaccccaatccctgttcaatttaattttgattctgaattgtttatggtaacaatgattgcgcctttgttatttgtagaaggtgttaatgtttctagagtccatttaaggaaatatattaagccagtgatgatgatggcattaggattagtcattactactgtgataggtgtcggtttatttattcattggatttggccagatttacctattggagcagcatttgcaattgctgccattctttgtcctactgatgcagtagcagtgcaagcaatcactaaaggaaaggtcttgccaaaaggagcaatgacaattcttgaaggtgagtcattattgaatgatgctgctggtattatttcatttaaaatagctgttggagtattagttacaggtgctttttcacttgttgatgctgttcagttgtttttaattgcatcaattggtggcgcagtggttggtttacttataggtatggcattagtaaggttccgattaacattgatgcgtcgaggatatgaaaacattaatatgtttacaattattcaattgttaacaccatttgttacgtatttaattgctgaattgtttcacgcatcaggaatcattgcagcagtagttgcaggacttgtacatggtttcgaacgtgacagaattatgcaagtacgaacacaactgcaaatgagttacaatcatacatggaatatactaggttatgttttaaatggctttgttttttcaatattaggatttttagtacctgaagttattattaaaattatcaaaacagaaccgcacaatttaatctttttaataggcatcactattgttgttgctttagctgtctatctatttagatttgtttgggtttatgtcttatatccttatttttatttagccatcagtccattccaaaaaatgatgactaaaaatgatgatgataatccaacaactgagaaaccaccaaagcgaagtttatacgctttaattatgacgttatgtggtgtgcatggaacaatttctttagcaatcgcattaacgttaccgtattttttagcaggtcatcatgcttttacgtatagaaacgacttattatttattgcatctggtatggttattattagtttggtagttgcgcaagtattattgccattattaacgaaacctgcacctaaaacagtaattggcaatatgtcgtttaaagttgctagaatttatatattagaacaagttattgattatctaaatcaaaaatctactttcgaaacaagttttaaatatggtaacgtgattaaagaatatcatgacaaattagcatttttaaaaactgtagagaaagatgatgaaaactctaaagaattagaacgtctacaaaaaattgcttttaatgtagaaacaaaaacattagagtctttagtagatgaaggacaaataacgaatagtgtacttgaaaactatatgcgttatgctgaaagaacacaggtatatagacaagcatcattaataagaagaatgattgtattattacgaggtgctttattaaaacgaagagtacaaacgagagtgaactcggcatcttcacttagtgttacggataacttaatggaattaaataaaattaataaattagtccattataatgtggttagtcgtttgtctaaggaaacaacaaaagataatacacttgaagttggaatggtttgtgacggttatttaatgcgaattgaaaacttaacaccatctaatttcttcaactcagcaagtgaagatacgatcactaaaattaaattaaatgcattgagagaacaacgtcgcattttacgtgagttgattgatacagatgaagtatcagaaggtacagcgttaaaactaagagaagccatcaattatgatgaaatggttattgtagatagtatgacgtagttcgtaattatgctaaaagggattgaatagatagttttaaactatacgaattattaatatttgagatttaattgaaataagttttaaaaattggaggagatagattaatcgaagtcatttaaagatgaagttaagtgcattcacaaaaaatagccacactcatatgacatcggatgagtgtggcttaaggatctatggggggaggaaaccatagatgtttactttgataggccagattaaatatcaaagtatgcgattatttatagcttgatgcaaaagtggtatgcctattaaaagttactgcacatagcttttaatattccgttcaaaggaaaggggcatacaattgaacaatctgtaatagtacttttaaccagctatgctaaaagtctagtagggagaacagttgtccaatcacataagaacctctaacttcgttagtacgattaagaaaagctttttagttagtatgtaatacaatttattgacgcgcgtgaatctcttttataagagtgtgtagggaatggcgttgtataaattgtattagaagaacttctaacgcatctctgtggttaaaagagatgaagggaacgacagtttaattaaaactgcataagaacttctagcttttctctctcgttcaaagagaagttctaataccaccatatcgtgcgatcgggaacggtatatatattaataggagggtaatatatatttaacgcacgatatgggactattagccttcgactttgttatgttgatgtgtggcctaaaatattggagataccaatattttaggttgcatcaacatcaattcatcttacttcattaaaacacagcgtgttatttcatgcttccgtgtacagtttcaatatttgatttcatcattttgtagtaagagtcacctttagtgccttctttaccgattgaatctgtgtacacttcaccaaagatatctttcttcgtttcttcagataaactttccattgctttcttatcaacacttgtttctactaataagtgttttaatttgtgctttttaacaaactcaatagcttgtctcatttgttcaggtgtaccttgtttttcagtgttaatttcccaaatataacctggtgtaataccgtattgttttgagaagtacttgaaggcaccttcacttgtaatcatggcacgttgttcttttggaatgtcattaaatttgtctttactgtcattatttaatttttccaattgagcaatgtatttgttaccttgcttttcataatctgctttatgttttttgtcgttatcgataaatgtttgttgaattgtttttacgtatttaataccgttatctaaacttaaccatgcgtgtggatcttgtttatctttgttgccttcttcaccgtttaaatagataggtttaacatcttttgatactgcgataacttttttatcttttaatgatttaccagcctgttctaaggctttttcaaaccaaccgttaccagtctctaaatttaatccgttgtataaaataacgtcagcgtcagttaactttttaatatctttaggtttaacttcatattcatgaggatcttgaccaacaggtacgatactatgaatatcgacattgtctccaccaacatttttagccatatcatataaaattgaattcgtcgttactacttttaatttgccatttgacttatcactgctttgtttaccaccagtaccacatgcagcaactagaagtaataaggctaataataaaggtactaattttttcatgttaaacttcctcgtttctttctattcgtaaattttgtgaaaaataatgtgatgatataaattacaaacgtacaaagtacgattgtcgcaccactaggaatgttgtaaatatagctgtaataaagtccgacaattgaacttatgacacttattaaacttgctataatcatcattgagtatagttttttactaattaaaaatgctgtagatgcaggtgtaattaataatgcaactacaagaataatacctaccgtttgaatacttgctactgttactaatgagagtaacaacatcacaaagtaatgtaataacgtcgtatttagaccactcattctactaaacgttggatcgaatgtagaaatcattaatggacgatagaaaataatgattagaataaggacgattgaaccaatcacaatagttgttaaaaatgcactatttgtgattgccagtaaattaccaaacagaatatggtacaaatctgtcgtagtgtttattaagctaataataataatccccgaagctaagaaagcggtaaaactaattccaatagcggcgtcaggtttcgttttactactagatgtgatataaccgataaaaatacttgcgatcataccagttataagtgcgcctataaacattggaataccaaataagaatgatagggcaacaccaggtaatactgcgtgactcattgcatctcccattaatgaaagaccacgtaatacaattaaactaccaactgtaccacaaactatccctacaataattgaagttatcaatgctcgattcaagaattgatatgtaaataaatgttcgacaaactctaacatgttatattgctcctttgactagggtcactacagtcagtgctactcataaatgtttcgtttaagcgagtgacactcatagcctcttcactatcaccaaagtatcgtaatgtttgatttaatagaataatgcgatcaaagtattgctttgcttttgatagatcatggtggatgataagaataagttttccttgttgttttaagttctcgatttttgtcatgattaatttttcgctactaaaatcaattccgacaaacggctcatctagaaaataaacttcactttcggacatcaatgctcttgctactagcacacgttgtaattgtccaccacttaattctgaaatttgtcgatgacgtaaagattctaattctaaatcgcttaataactgtttgagtttatcccttgctgatttattaggtcgtctaaaccatccaatttctttgtagcaacctgataaaatcacttgttccacacttataggaaaatctaaatcaatatgtgctttttgtggaatatatgtaatatgttgcagttgttgttgtataggtttgttatataacaatttagtaccggtagcattaaattcaccaattaaagacttgataagggaagatttaccagcaccattcgggcccatgataccaattatttcgccgcgtactggtatcgataaggaaatgtttttaagtacatgcttattacctaaaaacagatttaaatcttttgtttctaacaaacgtttatacctcctaattaaaagtttaggctaacctaattaattgtataataaactgagaatatttatcatgtcaagtaaattcgtgatataatatagacaatgtatgtgaggtgaaagtatgttaactgaagaaaaagaggactatttaaaggcaatccttacgaataatggcgataaaaactttgtaacaaataaaatcttatctcaatttttaaatattaagcctccatctgtaagtgaaatggtaggacgtcttgaaaaagcaggctatgttgaaacaaaaccgtacaaaggtgttagattaacagaggatggtttaacgcatacgcttgatatcattaagagacatcgactattagaattatttttaatagaaatattgaaatataattgggaagaagtacatcaagaagcagaaattttagaacatcgaatttcagatttattcgttgaaaggctggatagcttgttaaatttcccagaaacttgcccgcacggcggtgtgattcctagaaataatgaatataaagagaaatatataacaacgattttgaattatgaacctggcgatatcgttacaatcaaacgtgtgagagataagactgatttgctaatatatttgtctagtaaagatatttctattggtaatgaagtggaaattgtatcgaaagatgaaatgaataaagtaattatcatcaaacgtaatgataatgtaattattgtcagttacgaaaatgcaatgaacatgtttgctgaaaaataaaataaagaagccataaagatatccatgattgtactgataaagacatatggataattgctttaggcttcttttttattagttaatttatcaagtgagtatatttgagtaaaatattcactgcataaagattgaagataatccagattgtactataaatgaagataggtacatgactgagttctttaagtgcactaccatcccactgtggactcggacgctggaaagtcaatttagcaatcgtccaactagattgtagaacttcgcctaataatacacctaaaatatattgataactcattgtgacaagtagttgaatttctactatattttcatcttttaatataaaatacaacatgatagaaattaaagttataacaacaatgggtgagccttttctagatgttaaaattaaaaaataaataaatatcaataaataggtaaatataaagaaactaggtatctgataatggctcgacgctaaacctatcaataacataataggtggcataaaataaccaccaatcgttgtaagccattggcctgctagatgtctagattgtgtaattgcgaatccttgttgtaatgtctgttgtcgctctcgtggacttgttacaatgactaaatcttttgcacggccaccagcgagtttattaaacagtacatgaccaaattcatgtgttaaaacagggatatagtttaaaatgacatctaaatagttcaaaacaggcttatgtctatattgatgaatagcaatataacaagctgcaacaataacgataatgtatatattaagttgaattgtcgtattaaaaaagtttgataaataattcattgttaacctcatataagatagtaatttaaagtttgcttatcacttattataaatgatattggcatcaatagcgttagactttagacttaccttagttaaactaattttaatttttgaaaaggtgaatatgtgttaaaataaagcaaaatcatttcgatataaataggatgaatataaatactgttaatattgattacactaacataataatgaaataagataggagattcctgttatgactgttgaagaaagatccaatacagccaaagttgacattttaggggtcgattttgataatacaacaatgttgcaaatggttgaaaatattaaaaccttttttgcaaatcaatcaacgaataatctttttatagtaacagccaaccctgaaatagtgaattacgcgacgacacatcaagcgtatttagagttaataaatcaagcgagctatattgttgctgatgggacaggagtagtcaaagcttcgcatcgtttaaagcaacctctagcgcatcgtatacctggtattgagttgatggatgaatgtttgaaaattgctcatgtaaatcatcaaaaagtatttttgctaggggcaactaatgaagttgtagaagcggcacaatatgcattgcaacaaagatatccaaacatatcgtttgcacatcatcacggttatattgatttagaagatgagacggtagtgaaacgaattgaactgtttaaacctgattacatatttgtaggtatgggattccctaaacaagaagaatggattatgacacatgaaaatcaatttgaatctacagtgatgatgggcgtaggtggttctcttgaagtatttgctggggctaaaaagagagcgccttatatctttagaaaattaaacattgaatggatatatagagcattaatagattggaaacgtattggtagattgaagagtattccaatatttatgtataaaatagccaaagcaaaaagaaaaacaaaaaaggcgaaatagtcatgatgacaaaaataaaaccgaggaaatccttaaatggagattctcggttttttcggtttatttaataacgaagcgggactcatcgagtttgtttctaaattctttttgttcggctttggatttctttttaaaatcgtttaggaaagcttcatatttaggtaatacatcatcaagttcaccgtaatcttttaactttccgccttcaatccaagcaatcttagtacaaaattgtctcacttggcctaagttatgactaacgaaaaagatggttttgttttgctctttaaactcgtaaattttatctaaacatttttgtgcaaaagtttggtcacctacagataaagcttcgtcaatgactaagatatctggattaactgtgatattaattgaaaaaccaagttttgcacgcataccacttgaatactttttaactggttgataaataaactcaccaagttcactaaattcaataatcttaggtgtcatcgctttaatttctttacgcttaaagcccatacataacattttaaattcgatattttcaatccctgtaagttgtccactcaagccagcactaattgcgataacgctgacttcaccattacgatccacttttccaacagtaggcgacaaagaaccgccaatgatattgctcaacgttgatttgccggaaccattgatgccaacaagccctatgacgtcaccttcatatgcttttaaactaatgtcatctaaagcgaaaaatgttttgtttttatgtttgggaatgagcgcatctttcatacgttctttatttgtacgataaatacgatattcttttgttacatttttaatgtttaccgaaacgttcatttgtagaccttccttattcacatttatctagattataatatactactcaacagttgttaaattttaaaacctgttgtaaagtgtatagaagattttgttattatcagagttggtgttttgacacaaaatgttaatcatcaatgataacaatgatatttaaaaactaaacttatttcaacttacatgattgtatactataatgtatttgtaataaactaatattttaaagaactagacaataattttgatagcatccatgtatagtgatagtatttacaacaattattataatactatttagttaagtagagaaatagttaaacatttgaaagtgtggtttaatggaatgtcagcaataggaacagtttttaaagaacatgtaaagaacttttatttaattcaaagactggctcagtttcaagttaaaattatcaatcatagtaactatttaggtgtggcttgggaattaattaaccctgttatgcaaattatggtttactggatggtttttggattaggaataagaagtaatgcaccaattcatggtgtaccttttgtttattggttattggttggtatcagtatgtggttcttcatcaaccaaggtattttagaaggtactaaagcaattacacaaaagtttaatcaagtatcgaaaatgaacttcccgttatcgataataccgacatatattgtgacaagtagattttatggacatttaggcttacttttacttgtgataattgcatgtatgtttactggtatttatccatcaatacatatcattcaattattgatatatgtaccgttttgttttttcttaactgcctcggtgacgttattaacatcaacactcggtgtgttagttagagatacacaaatgttaatgcaagcaatattaagaatattattttacttttcaccaattttgtggctaccaaagaaccatggtatcagtggtttaattcatgaaatgatgaaatataatccagtttactttattgctgaatcataccgtgcagcaattttatatcacgaatggtatttcatggatcattggaaattaatgttatacaatttcggtattgttgccattttctttgcaattggtgcgtacctacacatgaaatatagagatcaatttgcagacttcttgtaatatatttatatgacgaaaccccgctaaccattaataaatggaagtggggttcatttttgtttataatttaagtaaataacatattaagttggtgtattatgaacgttttaataaagaaattttatcatttggtagttcgaatactttctaaaatgattacgcctcaattggttgataaaccgcatatcgtatttatgatgacttttccagaagatattaagcctatcatcaaagtattaaataattcgttgtatcagaaaactgttttaacaacaccaaaacaagcgccttatttatctgaacttagcgacgatgttgatgtgatagaaatgactaatcgaacattggtaaaacaaattaaggctttgaaaagcgcgcagatgattattatcgataattattacctattactaggtggatataataagacttctaatcaacacattgttcaaacgtggcatgcaagtggtgcattaaaaaactttggcttaacagatcatcaagtcgatgtgtctgacaaggcaatagttcagcagtaccgtaaagtttatcaagcgacggatttttacttagtgggttgtgaaaaaatgtcacaatgttttaaacagtctttaggtgcaacagaagagcaaatgttgtattttgggcttccgagaattaataaatattacacagctgatagagcaacggttaaggcagagttaaaggataaatatggaattacaaataagttggcattatatgtaccaacatatagagaagataaagcagataatagggctattgataaagcttattttgaaaaatgtttaccaggatatacactgattaataaattacatccatcaattgaacattcagacattgatgacgtatcttcaatcgacacgtctacattaatgctaatgtcagatataattattagcgactatagttcgctgccaatagaagctagcttgttagatattccaactatattttatgtgtatgatgaaggaacatatgataaggtgagaggcctgaatcaattttacaaagcaataccggatagctacaaagtgtatactgaagaagacttaataatgaagatacaagaaaaagaacatctattaagtccgttatttaaagattggcataagtataatactgataaaagtttacatcagctcacagaatatatagataagatggtgacaaaatgaggcttacgataatcatacctacatgtaataatgaggcaacaattcgacaattgttaatatctattgagagtaaagaacactatagaatcctttgtattgatggtggttctactgatcaaacaattcctatgattgaacggttacaaagagaactcaagcatatttcattaatacaattacaaaatgcttcgatagctacgtgtattaataaaggtttgatggatatcaaaatgacagatccacatgatagtgacgcatttatggtcataaatccaacatcaatcgtattgccaggtaaattagataggctaactgcagctttcaaaaataatgataatattgatatggtaatagggcagcgagcttacaattaccatggtgaatggaaattgaaaagtgctgatgagtttattaaagacaatcgaatcgttacattaacggaacaaccagatttgttaacaatgatgtcttttgacggaaagttattcagtgctaaatttgctgaattacagtgtgacgaaactttagctaacacatataatcacgcaatacttgtcaaggcgatgcaaaaagctacggatatacatttagtttcacagatggttgtcggagataatgatatagttccacatgctacaagtaacgatgaagattttaatagatatatcacagaaattatgaaaataagacaacgagtcatggaaatgttactattacctgaacaaaggctattatatagtgatatggttgatcgtattttattcaataattcattaaaatattatatgaatgaacacccagcagtaacgcacacgacaattcaactcgtaaaagactatattatgtctatgcagcattctgattatgtatcacaaaatatgtttgacattataaatacagttgaatttattggtgagaattgggatagagaaatatacgaattgtggcgacaaacattaattcaagtgggcattaataggccgacttataaaagattcttgatacaacttaaagggagaaagtttgcacatcgaacaaaatcaatgttaaaacgataacgtgtacattgatgaccataaactgcaatcctatgatgtgacaatatgaggaggataacttaatgaaacgtgtaataacatatggcacatatgacttacttcactatggtcatatcgaattgcttcgtcgtgcaagagagatgggcgattatttaatagtagcattatcaacagatgaatttaatcaaattaaacataaaaaatcttattatgattatgaacaacgaaaaatgatgcttgaatcaatacgctatgtcgatttagtcattccagaaaagggctggggacaaaaagaagacgatgtcgaaaaatttgatgtagatgtttttgttatgggacatgactgggaaggtgaattcgacttcttaaaggataaatgtgaagtcatttatttaaaacgtacagaaggcatttcgacgactaaaatcaaacaagaattatatggtaaagatgctaaataaattatatagaactatcgatactaaatgataaattaacgtaggttattataaaataaatataaaacggacaagtttcgcagctttataatgtgcaacttgtccgtttttagtatgttttattttctttttctaaataaacgattgattatcatatgaacaattagtgctaatccagcgactaggcatgcaccaccaatgatagtgaataatggatgttctgcccacatacttttagcaacagtatttgccttttgaataattggctgatgaacttctacagttggaggtccataatctttattaataaattctcttggatagtccgcgtgtactttaccatcttcgactacaagtttataatcttttttactaaaatcacttggtaaaacatcgtaaagatcattttcaacataatatttcttaccatttattctttgctcacctttagacaatatttttacatatttatactgatcaaatgaacgttccattaatgcattccccatcatattacgttgcttctcgccaccaaggtttttatagtctcccgcacccatgataacttgattaattctaaatttacctcgtttagtagtaatcgtatggttgtaatttgctgtatcacttgatccagtttttaaaccatctgtaccaggcaaactcatttttgcaccttctaatgaaaagttaaatgtgtaatacgtaactgcatgcgttgttggtgctaactgctttgtaaagtctaatattttaggtgtctctttaatcacgtgtaaatctaaaatggcatagtctctagcagtcgttacagtacgttcttggtctttatactttgttggtgcaaatgtacgtaatcttgaattttcagcacctgttggattgacgaaatgtgtatttttcattccgatagctttagctttgttattcattaaatcaacgaaatcgctggtgttttttgataccttcttagctaaaattaatgccgcggcattactagaattagataccgtaatttgtaataggtctgcgattgtccatacttgtccaggatatagtttcgtattactcaactcaggtagtgtagacataatatattctttgttcgtcattgtgacagtgtcgtcaagtgaaagctgccccttatttacagcttccaatgttaagtacattgtcattaatttagtcatagacgctggattccacttagtatcgatattgtattgatacagtaattgtccagtttgactaacattaacagcactcgtcggttcgtatgcagccgacaaacctgcataaccatattgatttgctgcttgtacaggagttacgtcactgttagcagcttgtgcatatggtgtcataatacttaatgttaaacataaaatgatgataatagatattaaatttttcataaagcgttaatcttcccttttccaattcttaaatattccctaaaagcaatggtcattcctacttacggaaatcattgctaattcacttcaccttaattaaattgttgaaaattaagtttcttgcggtttatttgaaaaataatgcaaatatattacgtacgtagctaaaggtgttataatgtttgtacgaagagcaaacttactcaaaagcgattaattatcatgttttaatataaaaactttgagaagttattacaaaaaatgcaatagaaatattctatcatataaatgttatgagcggtattttggggcaatactttatttgatttttaaagttttgttgggagaaagtatatgatagaaatgcatgtatctatctaaatgaattaactataaatttcaaacagaagaggtaaaactatgaaacgagaaaatccattgtttttcttatttaaaaaactatcatggccagtgggtcttatcgttgcagctatcactatttcatcactagggagcttaagtggactattagtgccactgtttactggacgaattgtagataaattttccgtgagccatatcaattggaatctaatcgcattatttggtggtatctttgtcatcaatgctttattaagcggattaggtttatatttattaagtaaaattggtgaaaaaattatttatgcgatacgctcagttttatgggagcatatcatacaattaaaaatgccattctttgacaaaaatgaaagtggtcaattaatgagtcgattaactgacgatacgaaagtgataaatgaatttatttcacaaaagctacctaacttattaccatcaatcgttacattagttgggtcactaatcatgttatttattttagattggaaaatgacattattaacatttataactataccgatatttgttttaattatgattcctctaggacgtattatgcaaaagatatcgacaagtacacaatctgaaattgcaaactttagtggtttgttagggcgtgtcctaactgaaatgcgtcttgttaaaatatcaaatacagagcgacttgaattagataatgcacataaaaatttgaatgaaatatataaattaggtttaaaacaggctaaaattgcggcagttgtacaaccaatttcaggtattgttatgttgctaacaattgcaattattttaggttttggtgcattagaaattgcgactggtgcaatcactgcaggtacattaattgcaatgatattttatgttattcaattatcgatgcctttaatcaatctttcaacgttagttacagattataaaaaggcagtcggtgcaagtagcagaatatacgaaatcatgcaagaacctattgaaccgacagaagctcttgaagattctgaaaatgtattaatcgatgacggtgtgttgtcatttgaacatgtagactttaaatatgatgtgaagaaaatattagatgatgtgtcgttccaaatcccacaagggcaagtgagtgcttttgtaggtccttctggatctggtaaaagtacgatatttaatctgatagaacgtatgtatgaaattgagtcaggtgatattaaatatggccttgaaagtgtctatgatatcccgttatctaagtggcgacgcaaaattggatatgttatgcaatcaaattcgatgatgagtggtacaattagagacaatattttatacggaattaatcgccatgtttcagatgaagaacttattaattatgctaaattagcgaactgtcatgattttatcatgcaatttgatgaaggatatgacacgcttgtaggtgaacgaggattgaaactgtctggcggacaacgtcaacgtattgatattgctagaagttttgttaaaaatcctgatattttgttacttgatgaagcaacagctaatctcgatagtgaaagtgaattgaaaattcaagaagctttagaaacattgatggaaggtagaacaacgattgtcattgcacatcgtttgtctacaattaaaaaagccggtcaaattatattcttagacaaaggacaggtaacaggtagaggtacgcattcagaactaatggcatcacatgcgaagtataaaaactttgtagtgtctcaaaaattaacagattaattttatatatataagtaagcttggagcaagtacagatataccatcgaggaaattaaagtgtggcacattgatggatatagatgttaataaattgcttcaagcttttgtctattttaaatcatgtgagatgttacgacataataattcttaaattaatgaaatcgatattttaagaaaaaaatgctcatggtataatacaagttataagtaaacatacatatattaaatactgtagccacgagtcataattcttcatattttacatagcaatttaactgattttagagtccacggtacagaagtttgatatttcaatgtttctaaatttttaaaaaattaaatcataggtgggtgccaaatgtttttattaatcaacattattggtctaattgtatttcttggtattgcggtattattttcaagagatcgcaaaaatatccaatggcaatcaattgggatcttagttgttttaaacctgtttttagcatggttctttatttattttgattggggtcaaaaagccgtaagaggagcagccaatggtatcgcttgggtagttcagtcagcgcatgctggtacaggttttgcatttgcaagtttgacaaatgttaaaatgatggatatggctgttgcagccttattcccaattttattaatagtgccattatttgatatcttaatgtactttaatattttaccgaaaattattggaggtattggttggttactagctaaagtaacaagacaacctaaattcgagtcattctttgggatagaaatgatgtttttaggaaatactgaagcattagccgtatcaagtgagcaactaaaacgtatgaatgaaatgcgtgtattaacaatcgcaatgatgtcaatgagctctgtatcgggagctattgtaggtgcgtatgtacaaatggtaccaggagaactggtattaacggcaattccactaaatatcgttaacgcgattattgtgtcatgcttgttgaatccagtaagtgttgaagagaaagaagatattatttacagtcttaaaaacaatgaagttgaacgtcaaccattcttctcattccttggagattctgtattagcagcaggtaaattagtattaatcatcatcgcatttgttattagttttgtagcgttagctgatctatttgatcgttttatcaatttgattacaggattgatagcaggatggataggcataaaaggtagtttcggtttaaaccaaattttaggtgtgtttatgtatccatttgcgctattactcggtttgccttatgatgaagcgtggttggtagcacaacaaatggctaagaaaattgttacaaatgaatttgttgttatgggtgaaatttctaaagatattgcatcttatacaccacaccatcgtgcggttattacaacattcttaatttcatttgcaaacttctcaacgattggtatgattatcggtacattgaaaggaattgttgataaaaagacatcagactttgtatctaaatatgtgcctatgatgctattatcaggtatcctagtttcattattaacagcagctttcgttggtttatttgcatggtaatatgtcgaagagtgactatgataatacattttaactaataaataggttcaggcatgtcgtctattgatataggtgagatgcttggacttttttcttattgatataaagatatttaaatatttttaaagttaccgaaattgaagcattataaaaaccaagtgtacatggtaatacacttggcttttatgggaaatgaatattattgtacatatgacagtaaggactaggtacagtcatagtacttcgagcaaaatttgttttgttattataaacaacacaaaggagataacttctctattgaagaagttaaaaacattatagcagacaatgaaatgaaagtaaattaaaaattcagaatatttttaattattatattgtgagtgatatttattagggaaagctattcttcatataaattagttaaatagtaaatctttgttagaactctttccatagagttgtgacagtatttttgttgtgctactatttttatagtctaataaatatataaaggggatggtttcgtgaataaaacggttaaagatttaatactagttgtcttaggttcatttatctttgctgcaggtgtaaatgcatttattatttctggtaacttaggtgaaggcggggttacaggtttagcaattattttatattatgcgtttcatatttcaccagccatcactaacttcttagtcaacgcagtattgattgccataggttataaatttttgagtaagagaagtatgtacttaactattcttgtaacaattcttatttcaatatttttgagtttaacagaatcatggcaagtagaaactggaaacagcattgtgaatgccatttttggtggtgtaagcgttggactaggaatcggagtaattatccttgcaggcggtacaacagcaggtacaacaattttggcgagaattgcaacgaaatacctcgatgtaagcacgccatatgctttgcttttcttcgatatgatcgttgttgcaatttcacttacagttattccacttgataaagtattagtaacagtaatatcactttatataggaacaaaagtgatggaatatgtcatagaaggtttaaacactaaaaaagctatgacgattatttcaactaatcctgacaaacttgccaaagcaatagatgagcaaattggaagaggtttaaccattttaaatggacatggctattatacgcgtgaagaaaaagatgtcttatacgttgttatttctaaaacacaagtttcaaaagcaaagcgattaattaaacaaatcgataaagatgcattcctcgtaattcatgatgtaagagatgtttatggtaatggctttcttgcagatgaataaataaatgatatgagcacacatacttaaatagaagtccacggacaagtttttgaattatgaagacttatctgtgggcgttttttattttataaaagtaatatacaagacatgacaaatcgagctatccaatttaaaaagtaatgttagtcaataagattgaaaaatgttataatgatgttcatgataatcattatcaattgggatgcctttgaaaattgataatttaaaaatagaaattattttttataaacagaaagaattttattgaaagtagggaaattatgaatcgtttgcatggacaacaagttaaaattggttacggggataacacgattataaataaattagatgttgaaataccagatggcaaagtgacgtcaatcattggtcctaacggctgcggaaaatctactttgctaaaggcattgtcacgtttattggcagttaaagaaggtgaagtatttttagatggtgaaaatattcatacacaatctacgaaagagattgcaaaaaaaatagctattttacctcaatcacctgaagtagcagatggcttaactgttggagaattagtttcatatggtcgttttccacatcaaaaaggatttggtagattaactgctgaggataagaaagaaattgattgggcaatggaagttacaggaactgatacattccgacaccgttcaatcaatgatttaagtggtggtcaaagacaacgtgtttggattgcaatggcattagcacaaagaactgatattatctttttagacgaaccaacaacatatttagatatctgtcatcaattagaaatactagaattagttcagaagctaaatcaggaacaaggttgtacaattgtcatggttcttcatgatatcaaccaagcgattcgtttctcagatcatcttattgcgatgaaagaaggtgatatcatcgctacaggttcaacagaagacgtattaacacaggaaatattagaaaaagtttttaatattgatgttgttttaagtaaagatcctaaaactggaaaacctttactggtaacttatgacttatgtcgcagagcttattcttaattaagtaagttaatatgataaaaaggacaattaacatgacaaatagagagaacccaacgccattgaagtttttatcctatattataggtttaagtatgatactactaatcacactatttatttctacattaataggtgacgccaaaattcaagcctctacaattatagaggctatttttaattataatcctagcaatcaacagcaaaacatcatcaatgagattaggattcccagaaatatagcagcagtaattgtaggtatggcgcttgcagtttctggtgcgattatacaaggtgttactcgtaatggtcttgctgatccggcgctcataggtttaaattcaggtgcttcatttgctttagcattaacatatgcagttttaccaaacacttcatttttaatattgatgtttgctggatttttaggtgctattctaggaggtgctattgtattaatgataggccgatctagacgtgatggatttaatccgatgcgtattattttagcgggtgcagcagtaagtgctatgttaacagcgctaagtcaaggtattgcattagcttttagactaaatcaaacagtaacattttggactgctggaggcgtttcaggcacaacatggtcacaccttaagtgggcaattccattaattggtattgcgttattcattatattaacaattagtaaacaacttaccattttaaatcttggtgaatcattagctaaaggtttaggtcaaaatgtaacaatgatcagaggcatatgtttaattattgctatgattctagcaggtatagcagttgctatcgctggacaagttgcatttgtaggtttgatggtacctcatatagcaagatttttaattggaactgattatgctaaaattctaccattaacagccttgttaggtgggttactcgtgcttgttgccgatatgatagcacgatatttaggagaagcgcctgttggtgcaatcatttcatttatcggtgttccttactttttatatttagttaaaaaaggaggacgctcaatatgattagttcaaataataaacgcagacaatggatagcactggctgtttttagcattctactatttctaggttgtacttggagtattacttcaggtgaatacaacatacctgtagaaagatttttcaaaactttaattggacaaggtgatgccattgatgagttaatcttattagatttcagattacctcggatgatgattactattttggcaggcgcagcgcttagtattagtggtgcaatagtgcaaagtgtcacgaaaaatccaatagctgaaccaggtatattaggtattaacgcaggcggcggatttgcaatcgcattatttattgcaactggtaaaattaatgctgacaattttgtttatgtattgccgttaataagtatactaggtggtatcaccgctgcattgattatttttattttcagttttaataaaaatgaaggtgttacacctgcgagtatggtattaataggtgtaggtttacaaacagcattatatggtggctcaattacaattatgtcaaaatttgatgataagcaatctgatttcatagctgcttggtttgcaggtaatatttggggtgacgaatggccatttgtcattgcatttttaccgtgggtgttgattattgttccttacttactatttaaatcgaatacactaaatattattcatactggtgataatattgcacgaggtctaggtgtaaggttaagcagagaacgtttaatattattctttatcgcagtgatgttatcatctgctgctgtagcagtagcaggttcaatttcgtttatcggattaatgggcccgcatattgccaaacgtatcgttggaccacgtcatcagttgtttttaccaattgccattttagtaggggcatgtttacttgttatagctgatacaattggcaaaattatattacaaccaggtggggttccagcaggtattgtcgtagcaattattggtgcaccgtatttcttatatttaatctacaaaacgaaaaatgtatagtgtcaaaggacacaacttattgctatgaaaggcactttattataaggcttttcatagcattttttatttaatgagccactcaagactatttattttttcaataatgaatcattaagttatcaagacggtcttatcaaaaatatatttgataacggtatcaggttgattctttatgatagcgcattcatttattctgttttatactatgactgataataccaaggaggtacaacatgatgaaaaagttaatcaataaaaaagaaacatttttaactgatatgcttgaaggattgttaattgcgcacccagagttagatctgattgctaatacagttattgtaaaaaaagctaaaaaagaaaaaggtgtagcaatagtctctggaggtggaagcggacatgaacctgcgcatgccggttttgttgcagaaggtatgctagatgcagcggtttgtggcgaagtatttacatcacctacaccagataaaatattagaagctattaaagcagtagataatggtgatggtgtattactagttgtaaaaaactatgcaggtgacgtgatgaatttcgaaatggcacaagagcttgcagaaatggaagatataaatgttgaaactgttattgttcgtgacgacattgctgtgacaaacgaagcacaacgtcgtggtgttgcaggaacggtgtttgttcataagcttgctggttatcttgctgaaaaaggttattcattaacagagattaaatcgcgtgtagaagcgttgttacctgaaattaaaagtattggtatggcaattgaaccaccgcttgttccaactactggaaaatatggctttgatattgaagacgacaaaatggaaatcggtattggtatacatggtgaaaaaggtattcatagggaagaagtaaaggatattgatcatattgttggaacattattagacgaattgtataaagaagttactgccaatgatgtcatattaatggtaaatggtatgggtggtacgccgttatctgaattaaatatcgtaactaaatatattcaacaaaatttgactgcaagaacggttaatgttgctaaatggtttgttggtgattatatgacatctctagacatgcaaggtttttctataactatcgtgcctaataaaccagaatatttggaagtatttttagcaccaacaacaagtaaatactttaaataagaagtgaatatgaataaatatacatttatgaggtggcacaaatgaaagtgaatgatatgaaagcacgtttattaaatttagaagaaacgtttaaaaaacatgaatctgaattaactgaattagatcgagcaattggtgatggtgaccacggggttaacatggttcgtgggtttagtagtcttaaagacaaacttgatgatagctcaatgcaatcattgttcaaatcgactggtatggcattgatgtcaaatgttgggggtgcatcaggaccactgtatggctttagctttgttaaaatgtctgcagtcgccaaaaatgatatgaataatcaagattttattacactaattcaggcatttgccgaagcggttgaatcacgtggtaaagttactttaaatgaaaagacaatgtatgatgtagtagcgcgagcagcagagaagcttaaaaatggtgaaactttaacattcaatgatttacagcaattagcagataatacaaaagatatggtagcaacaaaaggtagagctgcatattttggagaagaatcaaaaggttatatagatccaggtgctcaaagtatggtttatattttaaacgctttgattggagatgaagataatgcctaaaattatacttgttagccacagtaaagaaattgcaagtggtacaaaatctttgttaaagcaaatggctggtgacgttgatattataccaatcgggggattaccagatggttcaattggaacttcatttgatatcatccaagaagttttgactaaattagaggatgatgcattgtgtttttacgatattggatcttcagaaatgaatgtagatatggcaattgaaatgtatgatggtaatcatcgtgtgttaaaagttgatgcaccaattgttgaaggcagttttatcgcagcagtaaagctgtcaatcggcggttcaattgatgatgcattagcagaaatcaaacaatcattttagttaaaatttactaataatgaaaaatgtaaacctttttcaaatgaaactttataaaaaatatgatagtatatatgtaaatgtttaataaaatctggagaaataggaggacattgccatgcaacaccttataaaaaaacatgtattgaatggcgagtttgatttagtacgacaattgatgtccgaaacagattttatggaatttgaagaagcatatatttcaagtgcgcatgaagtagaaagtatgatgttttatacatgtattttagatatgattaagtacgaagaatcatctgagatgcatgacttagcatttttattgcttgtgtatccactaagtgaatatgaaggtgctttggattctgcttattatcatgcagacgcttccataaaacttactgacggcaaagaagttaaaagtttgttacaaatgttattattgcatgcgataccaacacctgttatttcagataagaaggcttttgatatcgccaagcaaattttaaaattagatcctaataataatgttgctcgtaacgtcttaaaagacactgccaaacgtatggacaacgttgttgttgatataaatgaattacaccaacgtaatgcacgttaattacatttcaattatattagcttaataatagttttaacatttggttgggttgggacatatgttccagccttttttaatacttaaaaactaacgaagtaaacttgtgtgcacaaatggtttttatacaacattttataaatttatacattttaataaagaacatacgatagatagtttaaacctttttaactgagaaattttgatatgtatttttcgaaatttaactaaaaatacgtaagtcaagaagcacaattattaatcatttttcctatacaaaagttcgtatgactgcattataaaagcataaatttataatttttttaaatgtcattgaacgtgataatgtgaatggattgagcaattttgaaaaagtgaaaaataacctatgcgacttgcaattaattttcagtacgttataatgcacactgtgcaaaattaaggaggtctattattcacatgatgatgaataaagaagcaacaaaaattggatttgcctacgtcggcattgtagtgggcgcaggattttcaacaggacaagaagttatgcaatttttcactaaatatggcttgtgggcttatttaggtgtcattatatctggttttattttagcttttattgggcgccaagtagcaaaaattggtactgcctttgaagcgacaaaccatgaatcaacattacaatacgtattcggtgaaaagtttagtaaagtctttgattatattttaatcttcttcttatttggaatagctgtaaccatgatagctggtgcaggcgcaacatttgaagaaagttataacatacctacatggctaggtgctttaattatgacattagcaatttatgtaacattgctattagactttaataaaatagtacgtgcccttggtgtcgttacaccatttttaattgttttagttgtattaatcgctggcgtttatttatttaaaggtcatgtttcattagcagaagttaaccaagtagtgcctgaagcaagtatctggaagggaatctggtttggtacaatatatggtggattagctttttctgtaggttttagtaccatcgtagcaatcggtggggatactgaaaagcgtacagtgtcaggtgcaggcgcgatgtatggtggtattatctatactgtattactagcattgatcaactttgcattgcaaagtgaatatccaactattaaaaatgcctcaattccaacattgacgttagcaaataatatccatcctttaatagcaacagtgttatctgttattatgctggcggttatgtataatactattctaggactaatgtattcatttgcagcacgttttacagaaccatacagtaaaaattatcatatctttattattataatgatggtagcaggttatttattaagtttcgtaggatttgctgaattaattaataagttatatacaattatgggatatgtaggcttatttattgtagtagctgtaattattaaatatttcaaacgtaaaaatgcggataaaaaacatattgcttaatatcatatgatggatatccgaaactttacaattgaatcactttgttttaaccttaaaagcaattcgtctctattcttatcgggcgaattgctttttatatttattcagtctattaatatgagcgtctaacaaatagagaggtacgatgtaatgaataaagataataaatggacgatgataactgcgctttttatagctgtaatcagtgtattgttatcatttcatctgaaacaacattatgaccaaattacaaatgagaaccatgctaataaagacaaaattaatattaaaaataaaaatgtgcgcatttatcaaaaccttacatacaatagagttttccctaacagtaaattagatattattacacctgtagatatgtcttctaatgccaaactgccagttattttttggatgcacggtggtggttatattgcgggtgataagcagtataaaaacccattattagcgaaaattgctgaacaagggtacattgttgtgaatgtaaattatgcattggcgccacaatataaatatcccactccattaattcaaatgaatcaagcaactcaattcattaaagaaaataaaatgaatttacctattgattttaatcaagtaattattggcggtgattctgcaggtgctcaattagctagccaatatactgcaatacagacaaacaatcaattaagagaagccatgaaatttgatcagtcattcaaaccatcgcaaattaaaggtgctatactatttggtggtttttataatatgcaaacagttagagaaactgagtttccaagaatacagttatttatgaaaagttatactggcgaagaagattgggaaaagagttttaaaaatatttcacaaatgtcgacagtaaaacaatcgacaaaaaattatccaccaacatttttatctgttggagatagcgatccattcgaaagtcaaaatatagaattcagtaagaaattacaagaattgaatgtaccagtagatactttgttttatgatggtacgcatcatttacatcaccaatatcaatttcaccttaataaacctgaatcgatagataatatcaaaaaagtgttacttttcttaagtcgtaatacatcttctagtggtattcaaactgaagagaaaccacaaatagaaaatccgagtaatgaattaccgttaaatcctttaaactaatgataaacagtagtaatttattacttaagcaacatttaagatcttcaaattgaaaaagaagaatttgaaacatatggggctaatgtgtaagagtctgagatataataaattgttagcggttctttatcatttttgtcccactctattatgatgtgacatttattttacaaactaatttgttttgaacctgaaaataactttttacaactaaatagtcaaaaaacagtgtgtacatgatataataaatttataaattgaaaagaattcaaaagaaaaattaaaatatagattgagcacgaagtgatttgaaaataaggttgtgaaaggaaatgacaaggtcagcattaaaaccatttaaaaataaacgcgttatggttactggacgtatacatcgtgttttgtttaaaaattatttagatagacacagcacatttaagccgaatgtaaggatattattaaaagatgtaattgtttcaggtgtttcaatagatcatttatggctatatgagacaaataaatactatgcattggcaatggaacttattcatcaacgagtaaaatttagtgcgaatgttgtaccgtattacaaaataaatagaaataataatttattcgtacaagattatggaattaagcgtaaaggtaagttagttactgaagaaacttacattcaaaacaatcagtatcaggataaaatatatgaaaaattaccgaatatagattttagactcgaagatttttatagtaaggaaaactaaataatatataaagcaccactaagcgtagttgatagttgatcaattacacattagtggtgctttattttgaattaaaatttgataaatgaataagagtatacgcattcatttaagattagatgacattgataaggatgagtaatgtattaggtaaccattaaattcgttgttatgcgattctgatacaagattatgataaaatagctttaattaagaattttagccatcatatagtcatcgtaatatttaccatcgataaataacttatcttttaaaacgccttcgatttgaaaatcggcacttttaaaaagctcgagggcaggttggttattgagtggtacatttgcttcaattcggtgtatttgattgtttaaacaccaagccataatggcatcaagaagtgcttgtccaattccacgatgttgatataatttctttacacctaaatcaattttagcaacatgtttaatgcgttgaaatggtgtcgtattaacaaaggcaaagccaacgagttgttcatcactttcagcaacaaagatgactttatgtggagaagtgatatattcttctaattgtttactagccgatgtgacgctaggatcatattctcctggtgtgtagaacatatacggagattcgtcgtatattttcgctaacattgaaatgaaattttctacatctttgatactaactctacgtataatatgggccataaaaagcctccagtattttgaaattttaaaacatttgctactattataatatatatgtaactaaaaggtggagtaatatgttttttggttacagtttaaaggagtattttagatgaaacctaaagttttattagcaggtggaacaggatatattggtaagtatttaagtgaagtgattgaaaatgatgctgaactttttactatatcaaaatatccagacaataaaaaaacagatgatgttgaaatgacttggattcagtgtgatatatttcattacgaacaggttgttgcagcaatgaatcaaatagatattgctgtattctttatcgacccaacaaagaattctgccaaaataacacaatcatcagcaagagatttaacattaatcgcagcagataattttggtcgagcagccgctatcaatcaagtaaaaaaagtaatctacatacctgggagtcgttatgataatgaaacaattgaacgcctaggtgcatatggtacaactgtagaaacaacaaatttagtttttaaacgttctttagttaatgtagaattacaagtttcaaagtatgatgatgttagatcaacgatgaaggtagttttaccaaagggatggacattaaagaacgttgtaaaccactttattgcatggatgggttacactaaaggaacttttgtgaaaacagaaaaatcacatgatcaatttaagatatatattaagaataaggtgcgaccgctcgcagtatttaaaatagtagaaacagctgatggaataataactttaattttattgagtggaagtttagtgaaaaaatatacagttaatcaagggaagttagaatttagattaatcaaagagtcggcagtcgtttatatacatctatacgattatatccctcgattattttggccgatttattactttatacaagcaccaatgcaaaaaatgatgattcatggctttgaagttgactgccggattaaagattttcaaagtcgattaaaatcaggagaaaatatgaaatatactaaatgatattgggtgatatggatgcaaatactactagtagaagatgacaatactttgtttcaagaattgaaaaaagaattagaacaatgggattttaatgttgctggtattgaagatttcggcaaagtaatggatacatttgaaagttttaatcctgaaattgttatattggatgttcaattacctaaatatgatgggttttattggtgcagaaaaatgagagaagtttccaacgtaccaatattatttttatcatctcgtgataatccaatggatcaagtgatgagtatggaacttggcgcagatgattatatgcaaaagcctttttatacaaatgtattaattgctaaattacaagcgatttatcgacgagtgtatgaatttactgctgaagaaaaacgcacgttaacatggcaagatgccattatagatctatcaaaagatagtatacaaaaaggtgacgatacgatttttctatccaaaacagaaatgattatattagaaatacttattaccaaaaaaaatcaaatcgtttcgagagatacaattatcactgcattatgggatgatgaagcatttgttagtgataatacgttaacagtaaatgtgaatcgtttacgaaaaaaattatctgaaataagtatggatagtgcaatcgaaacaaaagtaggaaaaggatatatggctcatgaataatttgaaatgggtagcttattttttgaaatctcgcatgaactggatattttggatattgtttttaaacttgcttatgttaggcattagtctaatcgattatgattttccaatagacagtttattttatattgtttctttgaatttaagtttaacaatgatttttcttatattgacatattttaaagaagtaaaattatataagcattttgacaaagataaagaaatagaagaaattaaacataaagatttagcggaaacgccatttcaacgtcatacagttgattatttatatcgtcaaacctcagctcacaaagaaaaggttgttgagcaacagttacaattgaatatgcatgaacagaccattacagaatttgtgcacgacataaaaacacctgtgacagccatgaaattattaattgatcaagaaaaaaatcaagaaagaaaacaggcattactatatgaatggtctcgtataaactcgatgctggatacacagctgtatattactagattagaatctcaacgcaaagatatgtattttgattacgtgtcacttaaacgcatggtcattgatgaaatacaattaacaagacatattagtcaggttaaaggtattggttttgatgttgactttaaagtggatgattatgtttatacagatataaaatggtgtcgtatgattattagacaaattttgtcaaacgcattgaaatatagtgagaattttaatattgaaattgggacagaattaaatgatcaacatgtttcgttatatattaaagactatggcagaggtattagtaaaaaagatatgccgcgaatatttgaacgaggatttacgtcaacggctaacagaaatgaaacgacgtcttcaggtatgggtctatatttagtaaatagtgtaaaggatcaattaggtattcacctgcaagtcacgtcgactgttggtaaggggacaactgtcagattgattttcccattacaaaatgaaattgttgaacgcatgtcggaagtgacaaatttgtcattttaaacatgcgttttgttacttagaattgatacatcaatgcagcttcaacgttataataagatagatgttagtcatatgttaaattgaagatacaagtgccaaagcctaaaggaaatgaagttaagataaattataggagtgttaaagtggcaattttagaagtaaaacaattaacaaaaatatatggaactaaaaaaatggcacaagaagtgttgcgagatatcaatatgtctattgaagaaggcgagtttattgctattatgggtccctctggatctgggaaaacgacattattaaatgttttaagttcaattgattatatttcacaaggttctattacattaaaaggaaaaaaattagaaaagctttcaaacaaggaattatctgatatacgcaagcatgatattggttttatttttcaagagtataatttactgcatacattgactgttaaagaaaatataatgttaccactaacggtacagaagttagataaagaacacatgttaaatcgttatgaaaaagtagcagaagcattaaatatattggatattagtgataaatatccttctgaattgtctggtggacaaagacaacgaacatctgctgcaagagcgtttattacattaccttctattatatttgctgacgaaccaacaggtgcactggattctaaaagtactcaagatttattaaaacgattaacaagaatgaatgaagcatttaagtctacaattattatggtaacgcatgatcctgttgcagcaagttatgccaatagagtagtgatgctaaaagatggtcaaattttcactgaattataccaaggggatgacgataaacatacctttttcaaagaaataatacgtgtacaaagtgttttaggtggcgttaattatgacctttaacgagataatatttaaaaatttccgtcaaaatttatcacattatgccatctatcttttttcattaattacgagtgtagtattgtattttagctttgtagcattaaaatacgcgcataaactaaacatgacagagtcatatccaattataaaggaaggctcacaagtcggaagctactttctatttttcatcataattgcatttttgttatatgccaatgtgttatttattaaacgacgaagttatgagcttgcattatatcaaacattaggtttatcgaaattcaacattatttatatactaatgctcgaacaaatactaatatttataattacggcaatattaggtattattattggtatttttggttcgaaactgttattaatgattgtctttacattattaggaattaaagaaaaggttccaattatttttagcttgagggcggtatttgaaacattaatgttaatcggtgtcgcttattttttaacatctgctcaaaattttatattagtgttcaaacaatctatttcacagatgtcaaagaataaccaggttaaagaaacaaatcataataaaattacatttgaagaggttgttttaggcatcttaggtatagtattgattaccacaggatactatctatctttgaacattgttcaatattatgattctatcggtacacttatgtttattttattgtcaactgtgattggggcatacttattttttaaaagctctgtttctctagtttttaaaatggtgaagaagtttagaaaaggtgttataagtgtaaatgatgtcatgttctcatcatctataatgtatcgtattaagaaaaatgctttttcacttacggttatggcaatcatttcagcgattactgtttcagttctttgctttgctgctataagtagagcgtccttatcaagtgaaataaaatatactgcaccacacgacgttacaattaaagaccaacaaaaagctaatcaattagcaagtgaattaaacaatcaaaaaattcctcatttttataattataaagaagtaattcatacgaaattgtataaagataatttatttgatgtaaaagcgaaagaaccatacaatgtaacaattactagtgataaatacatccctaatactgatttgaaacgtggacaagctgatttgtttgtagcggaaggttctatcaaagatttagtgaaacataaaaagcatggtaaagcaattataggaacgaaaaaacatcatgttaatattaagttacgtaaagatattaataaaatctattttatgacagatgttgatttaggtggaccaacgtttgtcttaaatgacaaagactatcaagaaataagaaagtatacaaaggcaaagcatatcgtctctcaatttggattcgatttgaaacataaaaaagatgctttagcattagaaaaagcgaaaaataaagttgataaatctattgaaacaagaagtgaagcgataagctcaatatcaagtttaaccggaatattattatttgtaacatcatttttaggtattacattcttgattgctgtatgttgcattatatacattaagcaaatagatgaaaccgaagatgagttagagaattatagtattttgagaaagcttggatttacacaaaaagatatggcaaggggactaaagtttaaaattatgtttaattttgggttacctttagttattgcactatcacatgcatattttacatcattagcatatatgaaattaatgggtacaacgaatcaaataccggttttcatagtaatgggattatacatttgtatgtatgctgtttttgcagtgacggcttataatcattccaagcgaacaattagacattccatataaaatatacagatggctttcagtagagtagtggattcggattcacgaactatactgggagctttttattataaatgaagagaagttatatttttagcatgtatagttgaatactgggttaaaataccatattaataatgaagtaaaggtatgagtgattatgaaagggttttgaaggaaatatatttaattggtgatgcttttaattgaaaagattaacaggattcaactttgtaaattgtattaaatgtgagaaaataaaagtatattcattgagagatatatgagtcaatgatcgttttaaacaagataagtgtattttaatatgtaaaagttatgtaataaatattgtatcgttgcaaatttcccaactatatccacttacaatttttagagttttatagataaaaaattgcctatacaacaactttttcaaaacaaatgcctactactatttaaattttatgtaaaagttaagtttcggaattgttaaaaatttgtaaattgaattgtgggattgtaaattttgtgctattttcatataagggcaaatacagtaaattgtttactgtgaggcatttttgaaattaatatcagtacactaaaattatactgacgattgataataacaaatttgtatcatgagtttgtaaattcacttgtcttaatttgaaacaaattataactgaatgtgattggtgacaatcgcttaaatggaggattttaaatgtttagtaagaaaaaagataagtttatggttcaattagaagagatggttttcaatctggatcgtgctgctattgaattcggtaaaatggatttcaatactcatttagatttaaaagcatactcagacaacattaaaacttatgagtcacatggtgacgaattagtacatcaagtaattactgatttaaatcaaacatttatcacaccaattgaacgtgaagatattttatcattatgtgatgcaattgatgatgttttagatgcaattgaagaaacggcagctatgtttgaaatgtattcaatcgaatacacagatgaatatatggctgagtttgttgataacattcaaaaagcagttgcagaaatgaaacttgctgtcggcttattagtcgataaaaaattatcacatatgcgtattcattcaattaatattaaagaatttgaaacaaactgtgatggtattttaagacagtcaattaaacatattttcaatagcgaaacagatccaatcacattaattaaaataaaagatatttatgaaagcatggaagaaattgctgataaatgtcaaatcgtagcaaataattttgaaactattattatgaaaaatagctaaggggagtatatatttatgtcatatataatcatcgtcactatagctgtagttattttctcgctgatatttgactttatcaatggattccatgatacagccaatgcagtagctactgctgtatctactagagcgttaacgcctaaaacggcaattttaatggcagcagtgatgaactttataggtgctttaacatttacgggcgttgcaggcaccattactaaagacattgtcgatccatttaaattggaaaatggattagttgttgtgttagctgcaatacttgcggctattatttggaatttagctacttggttttacggaattccaagttcgtcttcacatgcacttataggttcaattgcgggtgcagcaatcgcatctgaaggctcatttggagtgttacattaccaaggtttcacaaaaattattattgtattaatcgtttcgccgattatcgcattttgtgttggtttcttgatgtattcaatttttaaagttatctttaaaaacgcaaatttaacaagagcgaatcgtaattttagatttttccaaattttcacagcagcgttacaatcattctctcacggtacgaatgatgcgcaaaaatcaatgggtattattacgttggcattgattgttgctaatgtacagaatgatggcagcgttgaaccacagttatgggtaaaatttgcctgtgcgacagcaatggggcttggtactgcaattggtggctggaaaattatcaaaactgtaggtggtaatattatgaaaatacgtcctgcaaatggtgcagcggccgatttatcatctgcattaacaatttttgttgcgtcatctctgcatttcccattatcaactacacacgttgtgtcatcatcaattttaggtgttggtgcttctaacagagctaaaggtgttaaatggagcactgctcaacgtatgattattacatgggtgattacattaccgatatctgcgtttttagcagcgtttttattctatatacttaacttatttttctaattgaaaattaagctatactgaacttcagtatcacaaacatatggtggtattgaagttcattttttatgtaagtagataacatattttatagagtttacatagatagaccaagacaaagcattttaatttggggctatgttataaatgtattccatggaacataatcagttaggtcattaaaatatatgtaagagcaaaataatgatttaatagtttatattcttcaatgaatgaataattaaatagctatcaacttgtttaattaacctaaattgtattggactttatttaatataaatttgtatatgtagacgaaaaagcgtaaaatactggtataacaaattaaatcattatatagtcaacttagttgcattattttgatttttaatatattatgcatttaatttaatcaaataggtaggttattattttttacctaactaccattcatacaaaatataaataagtatgatagggaagggtgagataattttttgtaccaaaatgaaaatttttttcaaaaataaaaaactagcaatctcacatgatgtgaattgctagtatatatcagtacaatttatttaattaatggatgaatgcatagctagaaacttctgaagctggaattgtacggtagttcatattgtatggaccatatgtgtaattcatttcagaaatcaagatactaccatcaccattgacacgttcaacataagcaacatgaccatatggaccaggtgtgctttgcataattgaaccaactgatggtgtgttgtttacttggtaaccatcattagctgcgttaccagcccaatatttagcgtctgaccaatatgtgctaattggactaccagcttgagcacgacggtcaaatacgtaccatgtacattgaccagcagtgtataaattttggtgattaaaagatgatgcattgccattgctacctgttgtagctgttggtgttgtaccacctgaaccaccattaggaatttgtaatgtttggttaggcataattaaataaccacgtaagttattggctgccattaattgatcaactgaaacaccatatctgctagcaatgatatttaatgattcaccagcttgtacagtatgagatgatgctgaaccagcttgtggagaagtgtttgacgtattttgtgcatcacttccacctactgagataacttgaccagggaataccaagttgttatctaattggttattttgtttaatactctctactgaagtgttgtatttttgagcaatactccataatgattcaccagattgtactgtatgttgtgtagaagcttgtgcatcatgatgcgttaaaaatgcagctgcaccagaagttgctgttattgcaaatgctaattttttcaaagggactcctccttaaaattaagatttactacttttaaaaattattaagacaatttatatagtaaattaagttttcgttttatattacgctttccatattatcaaaaataagtagctttgtgtggtttgttattatcttgtaatattattaacattttaggatatcggttcatatttttataaatgctgatttgatagtgtataaaagcgttttagtgattttaactaattataaaaaattatattttgtaacattgtaaaatgtaaaattactatacttgttaaaggttatttcttttgatgaagcaaaatttactgtaaaatttgacgcataaaacgacagtagaaggaggaattagtttgtcgcaaaatacaaatcattcatattatcatcaaaaccagcatgctcaatcaataagtaaagtgtggctttattttatgtattattggattatatttggcataggatgctatctaggtcagtttttaccattaagttggcgacaacccttgtcatttggattactgattattattttagcaacacttgtttttgaaagagcgagacggttcggtttaattatttcacatatttacgctgtagtaattggcttattgtcatacgcaacgtttaccacgtatttacaaaatttaggaccagatattttctataaaaatatcgcattagcaatttttgcatttatagcatttggtattattggttatttcttcgttggagatgcatcgagtataggcaagtatttattcgttacattaataacattaattattgcgagtctaattggtatttttcttcaaaatcctattttttacactattattaccgtcgttagtctgttgttatttctactttatactttgtatgattttaatcgtttaaaaagaggtgactattcaccaagagaaatgggatttaatctatttattaatttgttgaatattattaaggatatactttatcttgctaatatgttcagaagataaacagttaaattaataaagaaatttgtataaagtttggaataatcaataatgaatatcaaccttaaattggagcgattgtcataaattagaaatttaaatagaggttttactgataaagcaataaaaatatattaccttaattgtaaagatattattaatcattgaaatgattaactgctatagttctaaagtaaacaaatcttagaagataaactttaaacaggtgtgcttgcctttctaattacacttttattagaaaagtaaagtatagctacgtattaattttaaaatcgaaatattaataggaataagtatagataatataaacaatttaatgttagtttgagctcatctcaaaagtagaatgtggtttaaataagtgtttatttttaaattgaaaatgaatataaaactaacaaaagataatagtaatacgttgtagatgtggtcatttaaaattattttgaaaatactaaaaagtagtgtgtttttcaattggatagtttaattaaactgactacatctatttttgtaatatttaaatgattgatatataagtttaaaaattacccattatatagttttatttatttttgatttggtattcgtattgtgttaaatttacatttaattaaataagttaaatattatagggaatgataaaagtggtacttaaatatagaaagaggtaaagttatggcaaaatcatgcttgcatatacttactaataatgaatatgcgacaacgcgttgccaagatggcatagtcttattttggccaattgacggggaaatcgaactacaaaaatttcgtaaaagtaaaataattgaagatgatatatatattattaatcatctggatgtatttagtattaagaataataaaaaaacgatcatgttgtatttgagtagcgattggtttgcggaattaggctttactttctttaattaccactatacagcaaagttaattaaatcatcctataatttgaaatgtctactattaaaattgacttatcgataccttgataatcaacctctcaatgacgctgatgttagaaaattacaggatattattaaaattattgcaaaagaagcaagtatggataaaaagattgcgcaaaatcaatatcgatatgcctattatggtgatttgcgtgacgagctcgaatatatttatcaaaatgtaaatcaacgattgacattaaaaagtgtcgctgataaattatttgtctcaaagtcaaatttgtcatcacaattccacttacttatgggcatgggttttaaaaaatatattgatactttgaaaattggtaaatcgattgaaattctacttactactgatagtactattagcaacataagtgaacatttaggttttagtagtagctcaacttactctaaaatgtttaaaagttatatggatataacaccgaatgaatatcgtaatttatcaaaatataataaatgtttaatgctaaagccagaaccactagtaggcaaaatggtgcaagaagtaaaagaaatcatattgaattatattgaacattataaaaaccacctaactgatgttatacatattgatgaagacaaatttgaaacacctaaattgtttcaaacggttattcaaataaatacttatacagaaatgaaattagttttcttagaaggaatctttaaaaccttattgaataagaacagtcaagttgtctttttcatcatgccatcgattttaaaaagtaaaaataccatgtccgaagaagaaaaattcgcaatcattaaaacaataattgaaagtgatttaaagatagcatttaatataaatgatattgatacaacttattatgttgaagaagcttttatgagtgtttttagacaaatatctccaaacgaattaagtaatcataataattacgaagtgcattttgtttttgatttatcattgatggaaattagaacaatttatcgaatgatattaaaattacataacatcatgttgaatgtgaaattaggattgaacattacctgtttatttgaaaaaccttcagtttttaaatcactagtatcacaaataaagcgacttaaattcgattcgttaataatagataatgcaaatttaagtagcccttatttgatgggggaaagtgatgagttactattgaaaaatattttgcattttaaaaatttaaaacaagtaattaatgaattggatattgaacaagaaaagctgatttttctaaatgttgaaaatcataaactgcttaataataaagaacaagatttaagtaatagtgctccattaatttataagacattaagtgcgctgtatcacaactttgctgggtttggattgaacatttttgacaatcatcaagcatttaatgcgatgcatctatatgacaaaaatggatttaaaacaacactaggtcttatattggaaaaatttatcgaatatgtctcaaaacccaaatatgaaaacagttattattctatttttgatatagagaattattattgtcttgttatttatgattggcgagtgatagagagcgagacaattatgagtaattttgaggatagtcaagtttatataaattttaaaaacaatgttttaaacgataaatatctaattgtaatagaaacattggacgaaaatagtggcaacattaatcatttgatttctaaagaattaagagataaatatgaatggaaccctagtttactatctaaaattgacaactaccttaaaccagcaatcgagattaaagagcataactttagtaataattccttaaatattaacgttacttttaatgcgttatacataattaaaataggaaaaaaataacaccttgatatgtattgcaaaatttaatttgcatttgttggtaattttgacaacgtattaaaaacaaatgagaaagacaatggcaggaaaatttaagataataatgacagaagcattgtctttatatatttgggggtgcaacattttgaatactgagaaattagaaacattgcttggcttctataaacaatataaagcattatctgaatatattgataaaaaatataagttgtcgctaaatgatttagcagtcttagatttaacgatgaagcattgcaaagatgagaaagtacttatgcaatcatttttaaaaactgcaatggatgagctagatttaagtaggacaaaattattagtttctataagaagactaattgaaaaagaaagacttagtaaagttagatcatctaaagatgagcgtaaaatttatatttatttaaatgatgatgatatatctaaatttaatgctttatttgaagatgtagagcaatttttaaatatttaattgaaattgagtgtcgaaagcatagaaattgcttatcggcacatttttaatttatacatattttaaaactaagtaacagattgaagaaatcgtagttcaataatgttaattgtgaaaatgtatataatcataaaaaaatcatgtataatatatgttgttaattaaacagttcgaaagcgagatgacattatgggacgtaaatggaataacattaaagaaaaaaaggcccaaaaagataaaaacacaagtagaatatatgcgaaatttggtaaggagatttatgttgcagcaaaatctggcgaacccaatccagaatctaaccaagctttaaggttggtgcttgaacgcgctaagacatattcagtgccgaatcatattattgaaaaagcaatagataaagctaagggtgctggagacgaaaactttgatcacctaagatatgaaggatttggcccaagcggatcaatgctaattgttgatgcgttaacaaataatgtaaatcgtactgcctctgatgtgcgagctgcttttggtaaaaacggcggtaatatgggtgtatctggatcagttgcttatatgtttgatcatgtggcaacatttggtattgaaggaaagtctgttgacgaaatacttgaaacattaatggaacaagatgtagatgtaaatgatgtgattgacgataatggattgacaatagtctatgctgaaccagatcaatttgcagtcgttcaagatgcgcttcgtgcagcaggtgttgaagaatttaaagttgctgaatttgaaatgttacctcaaacagatattgaactttctgaagcggaccaagtaacatttgaaaaattaatcgatgcattagaagatttagaagatgtacaaaacgtattccataatgtggatttgaaataatgaaatcagcagaacaatggattgatgaattgcaacttgaatcacatcctgaaggtggtttctatagagagacaatccgagaagtattgaaagatggacgcagagcgccgtttagtagtatttattttttacttacagatgacaatatttcgcattttcatcgaattgatgctgatgaagtatggtactatcatgctggtgattctctaacaattcatatgataaatccggatggggaatatacgactgcaacattgggtactgatatccaaaatggagatgtattgcaatatgtagtgcctaaaggaacaatttttgcttcttcaatcgaaatttcaaatacttatagtttagtaggttgtatgtgtcaaccggcatttgagtttaagcagtttgaattgtttaagcaatctgaattaattacacaatatccgcatcttaaatcagtgattgaaaaatatgctttaaaataaaaatgatcaatgaagtggtttgaaggttgttaataaacctttgagtcacttcatttttgtatgtattcttgattgaatcagaatagaattgatgctacagctttttctaatgaaattaacattaaatgattttgaaaacgataagaccatattatttataattttgaaaaatcattgttatgaagaagtatgtgtactatctaattaatattgtctattttaagtaaattgaagcgagttgtagtaaaataataataaatattttcatatgattaacaaaaactataaaactgtatcatgacatgacatcattcatgtagttttatataataatgacaaggagttggtgactgtgaaagtaaagtatatagataaacgtcactggcgtcgcctaattgatagggaatacacagaggtaaaagttaataataataggttcaagggtattataggcttagtcacgatgaaaaaggttcgtgatcctttagaggtgacggtagttggacaaaatattattgtcgcagatgacaattataaatggttgcaaatactacctgaaaagaaacgttatagtataactgtaatgtttgataataaaggcaatccattagaatattattttgatataaatatcaaaaatataacgcaaaaaggtaatgcacgtacagtagatttatgtttagatgttttagcattaccaagtggtgaatatgagttagtagatgaagatgatttaatgtttgcattagaaagtgagcaaattacaaaaaagcaatttcatgaagcatatatgattgcgcatcaaattatggcagagttagaaaatgattttaaaggattccaaaagaaaatcatgtactgctttaataaaattaatgcaaaggctcaaaaaaatcatcaaaagccacaaaataaaactaattttgaaaaaagcaaacaaataaaacctaagcaatataatcaaactaaaaatcaccaacaacaaaagaaaaactaagtaattcaagctgcagccataccaataaaattggtgaaattattcgttagtaatgaactcatgaatgcttgtagccatgaaagttcaataattgaataatttatggggggaaattatgaagattgaagactatcgtttactaataacattagacgaaacgaaaacgttacgtaaagcggctgaaattttatatatatctcaacctgctgttacacaaagactaaaagctattgaaaatgcttttggagtagatatttttatcagaacaaaaaaacaattgattacaacaactgaaggaacaatgattattgagcatgctcgtgacatgttgaaaagagagcgattattttttgacaaaatgcaggcacatattggtgaagtgaatggaacaatatcaatagggtgttcttcattgattggacaaaccttacttcctgaagttttgagcctatataatgcccaatttcctaatgttgaaattcaagtacaagttggttcaactgaacaaattaaagcaaaccatagagactatcatgttatgataactcgtggaaataaggtaatgaatttagctaacacacatttatttaatgatgatcattattttatttttccaaaaaatagacgagacgatgttacaaagttgccattcatagagtttcaagctgacccgatttatataaatcaaataaagcaatggtataacgataatttagagcaagattatcatgcaactattacagtggatcaagtggcaacttgtaaagaaatgttgattagtggtgtaggtgttacaatcttgccagaaattatgatgaaaaatatcagcaaagaacaatttgagtttgaaaaagtagaaattgataatgaaccgctgattcgttcaacgtttatgagttatgatccgagtatgttgcaattgccacaagttgattcttttgtaaatcttatggcgagctttgttgaacaaccaaaggcgtagtcttagactaatttaaggtgttagtatttaattttaaactattcggttaaattgaacgcagttggttgctaatgcaccaactgcataagatcccctaattaataaattaaaaggggactaaaggaatacagttgattgctaatgcaccaacagcaaaagagcccctaattaataaattaaaaggggctctaagaagcggggttatggatatgtttgcagcgttattacaaataaagaattataaactctttgttgctaatatgtttctactaggtatgggtattgcggttacggtcccatatcttgttctttttgcaactaaagatttaggtatgacaacaaatcagtatggattacttctagcatctgcagcgattagccagtttacagtaaattcaattattgctagattttcggatacgcatcactttaatagaaaaattattattattttcgcattattaatgggtgcgcttggtttttcaatatacttttttgtagatacaatctggttattcatattactatatgcgattttccaaggattatttgcaccagcaatgccccaactttacgcatctgctagagaatctatcaatgtttcaagctctaaagatagagctcaatttgccaacacagtattacgttcaatgttctcattgggctttttatttggtccatttattggtgcgcaattaatcggattaaaaggctatgctggattgtttggtggaacaataagtatcattttatttactttagtacttcaagtgtttttctataaggatttaaacattaaacatccgattagtacgcaacaacatgttgaaaaaattgctcctaacatgtttaaagacaaaacgcttttattaccatttattgcatttattttattacacattggacaatggatgtatacgatgaatatgcctttatttgttactgattatttaaaagaaaatgagcaacatgtcggttatttagctagtttatgtgctggtttagaagtgccatttatgatcattcttggtgttttatcatctagattacagactcgaacattgttgatttatggagcgatttttggtggtttattctacttcagcattggggtatttaaaaacttctatatgatgttagcaggacaggtgtttttagctattttcttagcggttcttttaggaattggcattagttatttccaagatatcttaccagatttcccaggatacgcctcaacactattttctaatgcaatggttattggacagttaggtggtaacttattaggtggtgctatgagtcactgggtaggtttggaaaatgtattttttgtatcagcaacatcaatcatgttaggtatgatacttatattctttactaaaaatcaaaaaattacaaaagaggatgtgatatcaacatgacaattattttatggctacttatcctcgctgccttcatgttagcatttgttgggttgattaagccgattattccttctgttttagtattatgggttggctttctaatctatcaatttggctttcataatcagcatttatcatgggtgttttatgtatctatggcattgctaacaatattaattttatgtgcggactttttagctaataaatattttgtgaatcgcttcggtggttctaagtttggagagtatgcagctttaattggtgtcgttattggatgttttgttttaccgccatttggaattattattataccttttattttggtattcatagttgaattaatacaaggctattcattcgaaagagcagttaaagtaagtattggttcaatcgtagcatttttaacaagtagtatagctcaagcaatcattatgtttataatgattgtatggttctttatagatgctttattgattaattaataaaaagcttattgcaaaatatgtttttcggtaactgtaatttagtgattttatcattaacagtaccaagttagcatatgatgtaataagctttttgtttataaaaatgtatgagaatgttttttcgaaatatttttttcaatgcttaatccaataggcataactataaatgaaaatataataaatacccaattgcttacctgaatatatggtccaaaggcaagtaatgattgtggaataaagaatacatagaaaaatcctacaattagtagaatgattgctaaataggtgaatatccatatccaatttgaattgttaaaacactgcagttgtattgttttaaaactaaaccatataaataaaaagacaataaagaatccaacgactactgaaaacgggaatgaaacaaaatataaattacttccacttttttccatgaaaaatcctaaaaatcctttgagaaagctaacaatcccaattaatagaacgatgtgctgatatatatatttaaaaatatttttaaatgtttcgttaggcatcgcttttagttcttttattgcatgtgcttttgggtcgtgattgaaaaaatctaaggctaataaaccatgttgttctgcgcttaataattgtttaagtatacggttaataattaactctgtatcatgaggattgacgcgaaagtcagagcgcatataagtcatataattctcgaagatttctctatcagtattgcttaatcttaatgatttaacattattttcttttgttaattgcgcagtacttttcattgttacttaagcgctcctttaaaaatgtttaattccaaattaaaatggaaatgattttatagtattaataaggtcaatcatatcatattaaacgcataaatataacgattaatattggagaggaaaatgaggacacttaataaagatgaacataattatatcaagcaaatagctaatatacatgagacattattgtcgcaagtagaatccaactataaatgtactaaactgagtattgctcttaggtacgagatgatatgttcaagattagaacatacaaatgataaaatttatatatatgaaaatgaaggtcaattaatagcgtttatttggggacattttagtaatgaaaaaagtatggttaacattgaactgctatatgttgaaccacaatttcgcaaactgggaatagctacgcaactgaagattgcgcttgaaaaatgggcaaaaactatgaatgcaaagcgaataagcagtacaattcataaaagtaatttgccaatgatatctttgaataaagatttaggttatcaagtgagtcatgtgaaaatgtataaagatattgattagaattaggattatgttgctaattcatgttaaaattaataaagatttaaatgacgttaaggagttttatatgaagaaattaatcatcagcatcatgtcagttatgattttattagcaggttgcggtaaaagcgaagaaaaagcaactcttgaaaaagatatcgataatttacaaaaagaaaataaagaattaaaagataaaaaagaaaagcttcaacaagaaaaagaaaaattagcagataagcaaaaagaccttgaaaaagaagtgaaagatttaaaaccttctaaagaagataacaaggatgataaaaaatacaaagataaagaggcatcacaagataagcaatcaaaagatcaaactaagtcatcggataaagataatcacaaaaagcctacatcaacagataaagatcaaaaagctaatgacaaacaccaatcataattgaattgcttacttgttatagatgaaaggtacagcgttttaaaccttattttaagggtatgtattaattaaaatgtagtcatgattgaaacagaacgtaaaaatagacaacgtaattaataaaggagagaaacggcatgcatgaacaagattttagaattttagaggggcaagatattactttgccagaattaggtagagaattagaaaatattacagggcgcacgattgctgattctactggcgaaattaagcgtgtaattgcacatttaccaaactttgagtccgatacagatacttttgttgctacatatcgtttaaaccatcaacaagattttatagatgcaacttttactgcgctgaaatcagatagagcacgtttaaaagaagtgccagttcatgttgaacttataagctatatttctaaatcaaaataaactgctatctaaaacgcaaagttgatcaaaatatcgattttgtgttttttattgagaaattatataggagtgtcaatcgatgatttattgtgaaacagagcgtttaatattaagagactggcatgaagatgatctgttaccttttcaaaaaatgaatgcgaattatgacgtacgtaaatattttccaagtttattgagttatcgtcgttcagaattagatatgagaactatggatgcggttattaaagattatggcattggattatttgctgtagaagataaagagtcccatcaatggataggctttataggtttgaattatattccagaaacaagcgattatccatttaaagaattaccgctttatgaaataggttggcgcttgttgccagaattttggggaaaaggattagcaactgaaggcgcaaaggcagcgttgaagttagcagaacaacatcaaatatacgatgtctatagttttacagcagaagcaaataaagcttcacaacgtgtaatggaaaaaattggcatgccagtgtatgatcatttcgaattacccaatctaagtaagtatcatttattaaaaaggcaagtgcgctattacattaatcttcgaaagtgaaaatttatacataagcgtaacaaacacccctaatattgtttagctgatgataacaatattaggggtgtttgtttattttttaaccttagaatgattaatcgtatgaacgagtacctagaggtttgaaatttaatattgattctattaatgattccttagtgtcgcataacggcgcaagtgcacgatacttaggatcaataaaaccttcctcaatcatatggtcaatcattgtttgtagtggattgaaaaagccattaatattataaatggcaataggcttttcatggatacctatttgagcccaactatacatttcgaaaaattcttctagtgaacctgcgccaccaggagccatgacaaatgcatctgcaagttctgccattttatttttacgttcatgcatagaatcaactaaaattaattcagttaaacgttggcttgtgatttcatgttcatctaacattttaggcatgacgccaatagctttgccaccatgatctaatacaccatcttgaatggcacccataataccaattgaccctgcaccaaatactaattcataaccttgttcagcaaaatatttacctaaatcgtatgctttttgtatatatgaagggtcatgacctttgcttgcaccacaataaactgcgattcgcttcatattaatccagctccttaattcgttgaatgactcttaatagtgattgttcaaacactttttgatcttgctttgtaaaaggtgggggacctttgtggcgaccactttgttttctaatttgtgcattcatatatcgtttatctaatagttgttgaatatttttggaattgtatatcttcccattatgatgcatgacaattaagactttgtcgactaataaacttgcgagtccataatcttgagtgattacgatatcatctttcgttgataattgaacaattttgtaatcaactgcatctggtccatcatcaacatataatgttgatacatgtgggggatataattggttcgaaaaatggctgaagctccgaataattgtcacaaaaatgcctgtctcagttgttaaatctataatagaatcaacaacaggacaagcatctccatcaataataatatgtgtcacaattatgcctctgtattgttttctttattttgttgagaggcgcttttggcaacataatctttatattttttaaatgacttgatgcgtgctttatcagcttcttgttggcgtttttgttcttctttgtgtcgtttttcaatatttttttgtaactttttattcattttagcgatttctttgcgatttttttcagctagtttatcgccttttttctcagttttctcatctaatttattaggtgttaagcctgctttttcttcgtatttttgtgattttttcatgtctttaatacgttgtattttattcttttcgcgtgctttttgctcttctttatgacgcttttcgatatttttttgaagtattttattcattttatcagcgtctttacgattttgtttagctaatttttcgccttttttctcaatataggcaggatcatgttctctagcaaactttttaagttcacgcttattttcaaaatcttgctttttatcgccgacatattctttaacatcactcgctgtgttactgattgctgcagatgtttttgaagcaactttacttgtagcatctgtaactttttgtacgtccggatgttgtttgatacgtttacgttcaacaattaatggtaccaatacaattggtaatacattaatcataaatttgatgacttttttcttatccatagatcttgcctccataattactttattaattttacataccctatgatacatcaatataaacgatgagagtagtgaatcacttataagtatttcagatgttttttaaagaagacaataaaaactgccaatcaagtggttccttaattgacagtctatattttaaaagaaaattaaatacctttaccaatgccaaatccgaagtaaagtatagcaataaagattactaatacaattctgtaaatggcaaatggaattaatttgattttgttaattagatgcaagaatgttttgattgcaattagtccaacagtaaatgcagctaaaaagcctaaaatataaaaaggtatatcagcaatctgaatatcttgataatgttttaataaagataaaccacttgctgccaacataattggaacagccataataaatgtgaagtccgatgctgctttatgatttaatttcattaatacaccagttgaaattgttgagcctgaacggctgaaaccaggccacatagctactgcttgagagataccaattacaaacgcttggaaataattgatttgatccactgtttgtgggtttttaactttaactgaatacttatcagcaataatcatgtagatagcacctacgaataagccaatcataacagttggcacactaaataaatgttcttcgatgaaatcatcaaatagtaagcctaaaatacttgctggcaccatacccactaatacatgtaataaatttaaacgtcttggctttgaacgtctttgttgattgttttctccttcaacatgtttgtgtttaccaatatgtaaaatctctaagaagcgttcgcggaacacccatgctgctgcaaagacggatcctaattggatgacgattttaaatgtaaatgctgattgagaacctaaaaattcagatgattttaaccacatatcatcaactagaatcatatgtccagtagaggaaacaggtgcaaattctgttaatccttcgacgacccctaagataataccttttattaattcaatgataaacataatgtacccactttcattactcaatttaatttatttaaatatcaaaattaccatatcatgatagcatattcatttaaagacatgctagttatagttataatactagactaaagatgtatatattcattttcttttacatgtaaaactacaatattttattgagctatttaatttgattttaaggaaaaccttttataataggtttaggtgatataattgtgaaaaaattaacaacaatactgtttcaatataaaatttttccggtactcatgttcttggtcagtactggtctcggcatactcgttataacacaaaatattttaatagcagattttttagctaaaattataagacatcaatttcaaggtttatggattgtattatttattttattaggtgttttacttttaagagcaactgtgcaatttctaaatcaatggttaggtgatacattagcatttaaagttaagcatatgcttagacaacgggttatttataaaaataatggtcatccaatcggtgaacaaatgactatactcacagaaaacattgatggtctagcacctttttataagagttatttgcctcaagtgttcaaatcaatgatggttccgctcatcataatcattgcaatgtttttcatccatttcaataccgcattaattatgttaataactgcaccatttattcctttgttttatattattttcggtttgaaaacgcgagatgagtcaaaagatcaaatgacttatttgaatcaatttagtcaacggtttttaaatattgctaaaggtttagtgacgttaaagctatttaatcgtacagagcaaacagagaagcatatttacgacgatagtactcagtttagaactttaacaatgcgcattttacgcagtgcttttttatcgggattaatgctcgaatttataagtatgttaggtattggattggttgcattggaagcaacgctaagcttagtagtatttcataatattgattttaaaactgcggcaattgcgattattttagcgcctgaattttataatgcaattaaggacttaggacaagcgttccatactggaaaacaaagtgaaggtgccagtgacgttgtgtttgagtttttagaacaaccgaacaataataatgaatttctattaaagtatgaggaaaatcaaaagccatttattcagttaacagacatatcatttcgatatgatgattctgatagattggtattaaatgatttaaatttgaaaatatttaaaggtgatcaaattgcacttgtaggtccaagcggggcaggtaaatccactttgacacatcttattgcaggtgtttatcatccaacaataggtactataagtacaaaccagcgtgatttaaatataggaatacttagtcaacagccatatattttcagtgcttctataaaagagaatattacgatgtttaaagatatagaaaataatattgttgaagaagtgctagacgaagtaggtttattagacaaagttcaatctttcacaaaaggcattaatacaataataggtgaaggaggcgaaatgttatctggtggacagatgagacgcatagaactttgccgtcttttagttatgaagccagatctcgttatatttgatgagcctgcaactggtttagatattcaaacagaacacatgattcagaacgttctgtttcaacattttaaagacacaacgatgattgtcattgcacatagagataatacaattcgccatttacaacgacgtttgtatatagaaaatggaagactgattgctgatgatcgcaatatttcagtaaatataacagaaaatggtgatgacttatgaaaacacgactaaaatttcaagtagataaggatttattgttagctatagttgttggtgtttgtggaagtttagttgcgctcgccatgtttttcttaagtggttatatggtgacacaaagtgcacttggtgcgccactatacgctctgatgattttagtcgttacagtaaaattgtttgggtttttaagagctattactcgatacgtagagcgccttatttctcataaagctacatttacaatgctacgtgatattcgggtacagtttttcggtaaattagtaaatgtcattcctaatgtttaccgtaaactgagttctagtgatttaatttcacgtatgattagtcgtgttgaggcgttacaaaacatttatttacgtgtttattatccaccagtcgtcatcggtttgacagcgctagttacagtaatagtattggcgttcatttcaatcggccatgcgctattgattatggttagcatgttgtttactttactcatcgttccttggttaagctcaaaaaaagcacgtactttaaagaaacatgcagctaatgaacaggcccgatttttaaatcatttttatgattataaagctggtatggatgaactacgtcgatttaatcaaactaatcattatcgagataatttgatggctaaattaaatcattttgataaattacaacttaaagagcaacgctttttaacgatttatgattttatattaaatattattgctatgctttcgatttttggaagtttagttctaggattaattcaaattaatgaaggccaactaaatattatttatatgacgagtatcgttttaatggtcttaactttatttgaacaagctgtaccaatgacaaatgtcgcgtattataaagcggatactgaccaagcattgcacgatattaatgaagtgatatctgtaccttctactaatggaaaaaacctccttactgataagtatgacgcaacgaacatttatgaagttaaggacgctagttttaagtattggaaccagcaaacgtatgtgttatcggatattaattttaatgttaatagaggcgaaaagattgcgattgtgggtccttctggttcagggaaaagtacattactacaaattatggcagggttatatcaattagatagtggctctattcgtttcgaaaatatggatatgtttgaaatagatgacaaagataagtttgaatcgttgaatgtcttgctacaatctcaacaattatttgatggtacaatacgtcaaaatttatttaccgatgaaaaagatgaagcggtgcaagcaatatttaagcaattagatttagaacatttggcactagaacgtcaaattgacttagatggtcatacattatctggcggagaaattcagcgtttagcgattgcgaggatgttattaaaagatactgcatcaacatggattttagatgaaccaacaacggcattagataaacaaaatagtttaaaagttatggatttaattgaagcacatgcagaaacattaattgttgctacacacgatttaactttattgtcacgttttgagaccatcattgtgatgataaatggtaaaatagttgaaaagggaaactatcaacaattactcgctaatcaaggtgctttatggaatatgattcaatataatgcataaaaaaactgcttgataggctaagaaacctttcaagcagttttttaactaacaagcttacgcgtgctaattgtttttctattcttaataaattctaaacattactttaattgtcatgacaaaagttaattatttttcctttgtttcatcaaatgcatgaatgactttacctaataagcgattaagttctttaacttcatcttgagataaagaagaagctgaagcgactttgtcagatgcattacttaattctggtctaatagtttcacttttgtcagtcaagtgaataaatacttcacgttgatcgacttcggaacgttcacgcttaattaagtctacttgttccattcgttttaataatggtgatactgtaccagtatcgagtgctaattcagttacgactttcttgacgtttacaggagattcatcccataaaatagttaagacaagaaattgtgggtatgttagattgtacttcttaaaaactttgttagagtagtagcgattaacttgtctttgagcattgtacaaactaaagcatagctgttcttttaaattatgttgatcagacattaaagttctcctccagacatactatccgtttttttctcttttcggattggtaatcattaaaaagttgattgtttattaattcacaactttctttgattcaatgccatgctaaaattaaagtatgtttaaagtttagaagatatttttgattaaatcaagcaaaaagataatttaatatatatgttatcatttttaaaaataactgtaatagaaaagagaatataaaatgaaaaataataaagatgaaaaaataagaatatccataattaacggatttttgggtagtggtaaaaccacgttactgacacattatattagtgaattattaaaaaatgatgagaaaattaaaatcatcatgaatgaattcggtacttttgatattgatagcaatagtatttcaaatgaaattgaagtccattcattgattaatggttgtgtttgttgcgatcttaaacaagaacttgtctatgaactaaaagccattgctttaaaaggggacgttaatcatgtcatcatagaagcgacaggcattgcgcatcctttagaattactagttgcatgtcaagatccgcaaatcgttaatttctttgaaaagccaattatttatggtgtactagatgcgactcgatttttggaacgtcatcaatataccgaaaatacagtttcgctgatggaagatcagttgaaactaagtgacatgattattattaataaaattgatcttgtaactgatgacagtcttgagaaaattgataagcaattaagtatgatttgtgcaagtattccaacttataaaacaacctatggacaagtttcgttggaagaattggacttacctggtaaagacagagagatatcgtctcatcatcaccatcatcatgggattaaaagtatgacttacacatttacaggtccgattgatcgtcaattgttttatcaattcataatgaaattaccggaatctgttctacgtttgaaaggttatgtatcatttagagatcaaccaaatgcaatttatgaatttcaatatgcatatggtttaccagactatggaataattggcatgcaattaccattaacgattgttattattggtgaaactttagatacaaatcacatacgtaatcaattggatatgctgcaatttacgtaaattagaaaatgtgttgtttcaatttaacggaaatagcacattaatttcttaatacttttattgtgaatattttgtgacattgagggatggagtggatgagatatggaacaaataatgattaatcactatgttcatttttctaggcttgtacaaggtttttggcgtgcaaatgaatggaagatgactgcgaaagagttaaattattttataaacgaattagttgaacgtgggattacaacgatggatcatgctgatatttatggggattatcaatgtgaatcactgtttggtaatgctttggatttatcacccgaattaagaaataaaattcaaattgttacgaaatgtggtatcattttgccttctaagcaatttgattttacaaatggacatcgttatgatttgagtagtaagcacatcgtgaaatctgttgaacagtcattaatcaatttgaatgtagattatttagatagtctactcattcatcgtccttcaccattgatggatccagaacaagttgctgatgcattaactaaacttgttaaacaaggtaagttgaagtcattcggggtgtcgaattttaatcattctcaataccaattgttaaatcaatatattaagaaagaaaaactacatattagcatcaatcaattagaattatcgccatatcacgttgatagtttacaagatggaacaatggattcaatgtatcaaaaccatgttcaaatcatggcttggagtccttttgcaggcggtaaaattttcgacaaggaagatattaaagcgcaacgtattatgaaagttattcaatcaatagctgacaaatatggtgtgagtgacacagctgtgatgatagcatggttagtaaaaataccgcatcgtatcatgccgatacttggaacaagtcagttaaagcgtattgatcaagcaatcgaagggctgcaacttaatttagatgatcagtcgtggtttgacatttacaccgctattatcggacaagatattccgtaaacttatttacttttaaatcataaaggagcatatcatgacaaacgaagataaacgtttcgaacaattaagatttgaacgcaaatttatagttattccgtatgtaatttatgcagtcattgtattactattaaatattttctattctgatttgaaaataacaatgacattattcggacttttctttgcgtataatgtagtcattttgttcatagcatttattaaacattataaacgcacattgttactaagtcttatattaacagtgcttagtggcgcggcattctttggaattatttatgtttatggcattaatcatttttaaatattaaaaagagactatctacaataatctcatttgcattttatctaactaagtttaacttttgcttagaaaaatgatgctatgaggatattcagtagatagtttttttatgttctaatatttaaacttagatatctttttgtaattaaccgagataactcatcacctagcaatattatttacaaaatatttcgataaaattgtgtattttgcataaattaaaaatgtatgttttaaaaaattgttataattaaattaagattaaacaaaggggtgactgttatgtcagaagaaaaaaaggtagttaaacatgaacaacaaaagaaagaaaagacaaaaaagcaatacaagccattttggattgttatgagttttataatacttatagttgtactattactcccggcaccttcaagtctgccaataatggctaaggcagtactagctattttagcttttgcagttattatgtgggtaacggaagctgtatcatatccggtgtcagcaactttaattattggcttaatgatattacttttaggatttagcccggttcaaaatttaggagaaaagctgggtaacccgaaaagtggtagtgctgttttaactggaagtgatcttctaggaacaaatcatgcattatcattagcgtttagtggatttgcaacatcagctgtagctctcgttgcagccgcattatttttggctgctgctatgcaagaaacgaatttgcataaaagactagctcttatagtgctatcaattgttggtaataaaactagaaatatagttattggagcaattattgtttcaattgtacttgcatttttcgttccttctgcaacagctagagcaggggcagttgtaccaatcttgctgggtatgattgcagcatttaaagtttctaaagatagcaagttagcgtcattattaataattacttcagtacaagctgtgtcaatttggaatattggtatcaaaacggcggcagcacaaaatatcgtagcgattaattttataaaccatcaattaggatttgatgtttcatggggcgagtggttcttatatgcagcgccttggtccatagttatgtctatagctttatatttcatcatgattaaagtgatgcctccagaaattaatacaatagagggtggcaaagatttaataaaagaagaattgcataaacttggccccgttagcgcacgtgaatggcgtttaattgttatatcgatgttattattactgttttggtcaactgaaaaagtattacatccgattgactctgcatccattactattattgctttaggtgttatgttaatgccgaaaattggtgtcatgacatggaaacatgttgaaaataaaataccatggggaacaattatcgtgtttggtgtaggtatttcactaggtaacgttcttttgaaaacaggtgcagctcaatggttaagtgatcaaacttttggtgttttaggtttaaaacatttacctattatcgcgacaattgcacttatcacgctttttaatatattgattcatttgggctttgcgagtgcaacaagtttatcatcagcgttaatacctgtttttatttcgctaacctctacgttacacttaggagaccagtctataggatttgttttaattcaacaatttgttattagttttggtttcttattacctgttagtgcacctcaaaatatgttggcttatggcactggtacttttacagttaaagatttcttgaaagcaggtataccattgacaattgtagggtatattctagtgatagtttttagtatgacttattggaaatggttaggtttgctttaattaaaaatataaataagaatctaggttattttaaagtgacaaaaagcttaataaaataaaaagataattgaagggtgttttgtttatggcaatagctgtgttattaaatcgtatgtttcgaacagaacataatccgttatttgaatatatttatcaacaaaaagatgatattgatgcttgttatttcattattgcagaagaggatatgagtacagcatctgatttgaaagcacaattttatcgcggtactttgcagcgcttttaccaatcgttgcacgcagaaaagctcacaccttatgtaatgtcttatgacgatatcatttcattttgtaaagaaaacaatatatctgaagtagtagtagcaggagatatcatgagttatcatcttgaagaatacgatattttacatcaacgttctcaatttgatcaagcagaaattaccgttacattagtacgtggtaatcattattttaaagcgagtaaaacgatgaataaacaaggtgaaccatacaaagtgtttacaagtttttataaaaaatggcgaccgtatttgagaattagagatgtatatcactacgacttaaatgagttaattgacattgtaattgcagctcctaataatttaaaagatgtccaaatagatgctggttcatcacaagcgcatgaacaagaaaaatggcaacaatttttagaacatgatatacagaattatgaaaatggcagagaatatttaccagaaatattaacaagtcaattaagcattgccttagcatatggcttattagatattattgaaattttcaatgatttgttatcacgatatgaagaagatgagtcaaactatgaagcgtttattcgggagctcatttttagagagttttattatgttttaatgacacaatatccggagtctgcacatcaatcttttaaaccgaaatatcgtcatattaattggtctgaaaatgaagcggattttaaagcttggtgtgatggtcaaacgggatttccaataattgatgcagcaatgatggaattgagacaaacaggttttatgcataatcgtatgagaatggttgtgtctcaatttttaacaaaagatttatttataaattggacatggggagaggatttcttcagaaagtatcttatagattatgatgcagcatcaaatgttcatggttggcaatggtctgcatctactggtacggatgcggtgccgtattttagaatgtttaatccaattaggcagagtgaacgctttgatcctaaagcattatatatcaaaacatatcttccagttttaaatcaaattgatgcaaagtatttacatgacacacatcgaaatgaatctgaattatttaaacaagggattgagttaggtcgtcattatccaaaacaaatagtggatcatcaagaaaagagatctcaagttttagcgacatttaaagcattagactaattgatctgatttgatggttcaactaaaataaaacaagctaactaagacatgttttgccatagttagcttgtttaaattgttctatcggaatatgtcagtaaacatagtgaaatatagcaagacatattccaaaaatgtaatgatataaatatactttagtcttatttttatatgttgaggaacatcccatttaggatattgtcgttcgaaataaatcatttgttgaacaaaaacgcctatacctagcggaaataacatcagcagaatacttcttgtgtaacttaaaccaatatcatgccataggtgtccaataatcatttgaagaacgatgattgatatcataaaaacggttatatctaaagtcactttttcaatctaactccttttccaaataataaaatagctgcttgcatcataaccataaagcatacaaatattgctgtgtcgattgttaaactttttagaatgtgatttaagacgcgtataggttcattaaagaagtatacggaatgtaagcgtaagaaacgtccgatgtaaatgccgaagccatttaaaaacataagaattacaacaattattctattaagccatggatgcgaagtaagcgttaaaatttcaaaatagattaaaatcattacataaattgctaaaaagacacctaacagtaaataagtaaagtacttccattcaaataagttaagccctgcataaaagttaaattgaaattggtttagatgaattaaatcagttaccatataaaatgtgttaggtaaaagtaatacaaatataaagctatatatgatgaagagcggccattcatattttttattgggtctaaataaacgcaaaagtaggcttagctcaaaaggtatatatgctaaaaataaatttaatgtcataaattgatatattttattctcaaatagtgacgcaataaataatactaaaaagtaaattctagcgatgtatcgtgaattcataaatgatatacactactttctaatgaaaaaagttattcatattaatgtggtaattataattacattcaaaactttatttaaaggtttatttactatagaaatgtctaaaccaaagtgcgaatgcatttataattaaacacttatgataacgtttgagttgatgtgtttcaactaaaaagtaatgtcttattgtggatcaagtaaatttaaaccaactgaatcattgaatgtacgttgaatatccatatctgtaacggtaagcacaatttcagcagttgcagaaacaattgctttagcgagatgtccgctaaaagtttcatatgattgcgtaccaaatgttgcatgtaaatgtgcaaaatgtccattatctagacgagaaatattacctaataagctcgtcaattccagtggctcagtaatatgtttttcttcatattgtttcgttgttaaattgaaaaattttaaaatgacgtcatcacatgcaccaatgccgctgacagatgtaaatgttaagtcttggtcatctgcaaaggttgttatacattcaatgatgtcttctcctttttctaacactagtagtatagtatgattacttttttgcaatttcatatgatcaatcccctttattttaatatgtcattaattatacaattaaatggaaaatagtgataattacaaagaaaaaaatattgtcaattgtagcaatattgtaatacaatatagaaactttttacgaatatttagcatgaattgcaatctgtcgtggaaaagaaaaataacagctttaagagtgacaagtagaaaaaagaggtgagcaaatgaataaacagattttggtattatattttaatattttcttaatttttttaggtatcggtctagtgataccagtcttacctgtttatttaaaagatttggggttaactggtagtgatttaggattattagttgctgctttcgccttatctcaaatgattatatcgccattcggtggtacgttagctgataaattaggaaagaaattaattatatgtataggattaattttgttttcagtgtcagaatttatgtttgctatcggtcagaattttttaattttgatgttatcaagggttatcggtggtatgagtgctggtatggttatgcctggggtgacaggtttaatagctgacatttcaccaagccatcaaaaagcaaaaaactttggctacatgtcagcgattatcaattcaggattcattttaggaccagggattggtggatttatggcagaagcttcacatcgtatgccattttattttgcaggtgcattaggtattctagcatttataatgtcaattgtattgattcacgaccctaaaaaagtttcgacaaatggattccaaaagttggagccacaattgctaacgaaaattaactggaaagtgtttattacaccagttattctaacacttgtattatcgtttggtttatctgcatttgaaacattgtattcactatatacagctgacaaggtaaattattcacctaaagatatttcgattgctattacaggtggcggtatatttggggcacttttccaaatctatttcttcgataaatttatgaagtatttctcagagttaacatttatagcttggtcattattatattcagttgttgtcttaatattattagtttttgctaatggctattggtcaataatgttaatcagttttgttgtcttcataggtttcgatatgatacgaccagccattacaaattatttttctaatattgctggagaaaggcaaggctttgcaggcggattgaactcgacattcactagtatgggtaatttcataggtcctttaatcgcaggtgcgttatttgatgtacacattgaagcaccaatttatatggctataggtgtttcattagcaggtgttgttattgttttaattgaaaagcaacatagagctaagttaaaacaacaagatttgtaatatcgcacatggttgtcattcgattaatgtatttcgacaactaaagcattacaaaataagcatcgattttcttacaattatagtgaagaaaagtcgatgctttacatttaaaaagattcgattgactaaatgttctactctttatatttaaatgttatatgtaacaaaaaatgattttgagtaataaacatgttacaaatattacattctttttaaattgcaatccacatacctaattcattaacgttaatgtgttaagatgataaaaaatgagtaaggaaatgtgggtaaggggatgacagtaaaaaatttatttttaggctttgttgctgtaatattaactgtttgtttaattggtttattaatattagcaacaaatgaagttgcgcttgctaaggtacataaaacgattaatacgcttaacgcgataaatgtatcaactgaagatacttataaaaagaaaatggatattctcaatattcatactgctaaagcatctgaagtgaatgaaaatgtgaaaaagcaaaatcattttaagcatcgtgtgaatgcaaataaatcaaattcttttaacgaacaagagtgccaagttattgctgatcgttatgcagataagcatatcaatgataattatggtttagaaagaatttctaagacaaatcatggatataattatgtttattccaatgataattcaactagtaagcaacatgtaagtatttcaaatcaaggcataataacgaaataatagatggaacagtgtattctaattggatatactgtttttattttgcaatattttaatttaaaaaggtgaaatcaacttataaaatgatgtaaatgtaatgtcaaaatcaaccaatccgtaatgtattttaaaatgttaatatagttctgaagaagtataaatgaggtgttgaaatggctaaaaataagaaaacgaacgcgatgcgtatgcttgatcgtgcaaaaattaaatacgaagttcatagctttgaggtaccagaagaacatttatctggtcaagaagttgcagaactcatacaagcaaatgttaaaacagtatttaaaacacttgttctagaaaatacaaaacatgaacattttgtatttgttatcccagtaagtgaaactttagatatgaaaaaggcagctgctttggttggagagaagaaattgcaacttatgcctttagataatttaaaaaatgtaacgggatacattcgtggtgggtgttcacctgttggtatgaaaacattgtttccaacagtcgttgaccaatcctgtgaaaattatagtcatatcagtgtgagtggtgggcttcgaacaatgcaaatcacgatagcggttgaggatttgattacaataactaaaggcaaaattggagcagttatccatgaatgattaataacaacaaaaagtatggggcaagattaggagtgtgacagagatgaaatttttataaaattcatttctgctacactcctttttgattgaaatagcattttacgatcataaacagtcatgataattgagtatttgaacataaaaatgtaattttatcgtcacaatttgattgtttgtgattgtttttggtaatttatgattgaaaagtgaaagcgtactcattataatacagagtgagatggggtgatgatgataattacagaaaaaagacacgagttaatattagaagaactttcgcacaaagattttttgactttacaagaattaatagatcgaactggctgcagtgcttcaacaatacgaagagatttatctaaactacaacaattagggaaattgcaacgtgtgcatggtggtgcaatgttaaaagaaaatcgtatggttgaggcgaatttaactgaaaaattagcaactaatctcgatgaaaagaaaatgattgctaaaatagcagctaatcaaatcaacgataatgaatgcttatttatcgatgctggttcatctacattggagctaattaaatatattcaagcgaaagatatcattgtggtaaccaatggtttaacacatgtagaagctttacttaaaaaaggtattaaaacaattatgctaggtggtcaagttaaagaaaatacacttgctacgattggttcaagtgccatggagatattaagacgatattgtttcgataaagcttttatcgggatgaatggattagatattgaacttggattaactactcccgatgagcaagaggcattagttaaacaaacagcaatgtcattagccaatcaatcatttgtacttatagatcattctaagtttaataaagtatattttgctcgtgtacctttgctagaaagtacgacaatcatcacatctgaaaaagcattaaatcaagaatcgttaaaagaataccaacaaaagtatcactttataggagggactttatgatttatacagtgactttcaatccttcaattgactatgtcatttttacgaatgattttaaaattgatggtttgaacagagcaacagcaacatataaattcgctgggggaaaaggtattaatgtctcacgtgttttaaagacattggaagttgagtcaactgctttgggatttgcaggtggatttcctgggaaatttattatagattcattaaataacagtgcaattcaatcgaattttattgaagttgatgaagatacacgtattaatgtgaaattaaaaacaggacaagaaacagaaatcaatgcaccgggtcctcatataacgtcaacacaatttgaacaactgttgcaacaaattaaaaatacaacaagcgaagatatagttattgttgctggaagtgtacctagtagtattccaagtgatgcgtatgcgcaaattgcacaaattacagcacagacaggtgctaaattagtagtcgacgctgaaaaagaattggctgaaagcgttttaccatatcatccactatttattaaacctaataaagatgaattagaagtgatgtttaatacaacagtgaactcagacacagatgttattaaatatggtcgtttgttagttgataaaggtgcgcaatctgttattgtctcacttggcggtgatggtgctatttatattgataaagaaatcagtattaaagcagttaatccacaagggaaagtggttaatacagttggttctggtgatagtacagttgcaggcatggtggctggaattgcttcaggtttaacgattgaaaaagcattccaacaagcagtcgcatgcggtactgccacggcatttgatgaggacttagcaacacgggacgctatagaaaaaataaaatcacaagttacgattagcgtacttgatggggagtgaaaataatgagagtaacagagttattaacaaaagatacaatagcaatggatttaatggcaaatgacaaaaatggtgttattgatgagttagtaaatcaattagacaaagcaggtaaattaagtgatgtcgcgtcatttaaggaagcgattcacaatcgagaatcacaaagtacgactggtatcggcgaaggtattgctattccacatgcgaaagtagccgcagttaagtctccagctatcgcattcggtaaatctaaagaaggtgtagattaccaaagtttagatatgcaaccagctcatttattctttatgattgcagcgccagaaggtggtgcccaaacacatttagatgctttagctaaactatctggtattttaatggatgaaaatgtacgtgaaaaattattacatgcatcgtctccagaagaagtgttagcaattatcgatcatgctgatgatgaagcgacaaaagaagaagaggcagaagctgaagcacaacaagttgctgctgtagaagcaaatcaagacactaatggatcaaacgagccatatgtattagctgtaactgcttgtccaacaggtattgcacacacatatatggcgcgtgatgcattgaaaaagcaagcggataaaatgggcattaaaattaaagttgaaacgaacggttcaagtggtattaaaaaccatttaacggaacaagatattaaaaatgcaacaggtatcattgttgctgctgatgttcatgttgagacggatcgcttcgatggtaaaaatgtcgtagaagtaccagtagcagatggcattaaacgtccagaagaattaattaataaagcattagatacaagtcgtaaaccttttgttgcccgtgatggtcaaagaaaaggtaactcaaatgacagtcaagaaaaattaagtccaggtaaagcattctataaacacttaatgaacggtgtttctaacatgctaccacttgtaatatctggtggtattttaatggcaatcgtgtttttatttggtgcaaactcatttgatccgaaaagttcagagtacaatgcgtttgcagagcagctttggaacattggtagtaaaagtgcattcgcgttaatcattccaattttatctggtttcattgcacgtagtattgcagataaacctggattcgcgtcaggtcttgtaggtggtatgttagcaatttcaggtggttcaggatttattggtggtattattgcaggtttcttagcaggttacttaacacaaggtgttaaagccatgacacgtaagttaccacaagcattagagggattaaagccgacattaatttatccactattaacagtgacagctacaggcttattgatgatttatgtctttaatccaccagcatcttggttaaatcatttgttattagatggattaaacaatttatcaggttctaatattgtattattaggtttagttattggcgctatgatggcgattgatatgggtggtccattcaacaaagcggcatatgtttttgcaacaggtgcgttgattgaaggtaatgctgcaccaattacagctgcaatgattggtggtatgattccaccgttagcaattgcgacagcgatgttaattttcagacgtaaatttacaaaagaacaacgtggttcaattatccctaactatgtgatgggtatgtcgtttattacagaaggtgcgattccatttgcagctgccgatccattacgtgttattccttcaatgatgattggttcaggtataggtggcgcaattgctttaggcttaggttctcgaattactgcgccacacggtggtattattgtaattgttggtactgatggtgcacacttacttcaaactcttattgcacttctagttggtacattagtttcagcattaatttatggacttattaaaccaaagttaactgaaacagaaatcgaagcttcaaaatcaatggacgagtagttttaatgatttaaagtgattgttagcaaagagcttcatattaagttgtaagttcaatgaatatatgttagttttatatatcgtgttaacggtagcttatacaaagctgtaaaaacactttctattaatttagtttttatgaattgatatgaaggtgtttttatttttagataaatgaatgaagaaatagataccacaaatttatagacttttttaatattttgcaaaaagttatgccaaacgaagcagatatagtaaaatatgagtgtcttaaagtgaaaatttataaataaagaagggtttatacgtgtcagaattaattatatataacggcaaagtttatactgaagatggcaaaatcgataatggttacattcatgtgaaagatggacagattgttgcaattggagaagtaaatgataaagcagcgattgataatgatacgacaaataaaattcaagtgattgatgcaaaaggtcatcatgtagtgccaggttttatcgatatacatattcatggtggttatggacaggatgcaatggatgggtcatacgatggcttaaaatatctatccgaaaatttgttgtctgaagggacgacatcatacttggccactacaatgacgcaatcgactgataaaatagataaagcacttataaatattgctaaatatgaagtggagcaagatgttcacaatgcagcggaaattgtaggtatacatttggaagggccatttatatctgaaaataaagttggtgctcaacatccgcaatacgttgtacgcccatttatcgataaaattaaacattttcaagagactgctaacggactaataaagattatgacgtttgcacctgaagttgaaggtgcaaaagaagcgcttgaaacgtataaagatgacattattttttcaattggtcatacagtggcaacatacgaagaagcagttgaagctgttgagcgaggagctaaacatgtcacgcacttatataatgcagcgacgccattccaacatagagaaccaggtgtttttggagcagcatggttgaatgatgctttacataccgaaatgattgttgatggcacacattctcatccggcatcggttgcaattgcttaccgtatgaaaggtaatgaacgtttttatttaattaccgatgcaatgcgtgcaaaaggtatgcctgaaggagaatatgatttgggtggtcaaaaagtaactgttcaatcgcaacaagcacgtcttgcaaatggtgcgcttgctggtagtattttaaaaatgaatcatgggttacgtaacttaatatcatttacaggtgatacattagatcatttatggcgtgtaacaagtttaaatcaagccattgcattaggtatcgatgatagaaaaggtagtattaaagtaaataaggatgcagatcttgttattctagatgatgacatgaatgtaaaatctacaataaaacaaggtaaggttcacacatttagctaatagataatcataattaaatgtatgcaatagatttaatctgttaacataagcactttatattatgataaaatagaggcaataacattttttctgggggtgtctaaatgggaaggcgataacatgtagttgtaatttaagtcatagtgataaatttgaatgcgtgttacccatgagtgacacatataacatggaggtgaatccctagaaatagggaattaattggaaacttcgaccataattagtttgattatatttattctattaattgcattaaccacagtatttgttggttcagaatttgcattagtaaaaattagagcaacaagaattgaacagctagcagatgaaggaaataaacctgctaaaatagtaaaaaagatgattgctaatctagattattatctttctgcttgtcagttaggtataacagtaacatctttagggttaggttggcttggtgaaccaacgtttgaaaagctattacacccgatatttgaagcaatcaatttaccaactgcattaacaacgacgatttcgtttgcagtatcatttataatcgttacgtatttgcatgtagtacttggtgaattagcgcctaaatctatagcgattcaacatactgaaaagcttgctttagtatatgcaagaccattgttctatttcggtaacattatgaaaccattgatttggctgatgaatggttctgcacgtgttattattagaatgtttggtgtaaatcctgatgcccaaaccgatgcaatgtcagaagaagaaatcaaaattattattaacaatagttataatggtggagaaatcaaccaaactgaattggcatatatgcaaaatatcttttcattcgatgaaagacatgcaaaagatataatggtacctagaactcaaatgattacactaaatgaaccttttaatgtagacgaattactagaaacaataaaagaacatcaatttacgcgttatccaattactgatgatggtgataaagaccacattaaaggatttattaacgtcaaagaatttttaactgaatatgcttctggaaaaacgattaaaatagcaaactatatacatgagttgccaatgatttcagagacaacacgtataagtgatgcattaattagaatgcaacgtgaacatgttcatatgagtcttattatagatgaatatggtggaacggcaggtattttaacgatggaagatattttagaagaaatcgttggggaaattcgtgatgaatttgatgatgatgaagtgaatgatatcgttaaaattgataataagacattccaagtaaatggtagagtactattggatgatttaactgaagagttcggtatagaatttgatgactctgaggatattgatacgataggtggatggttacaatctcgtaataccaacttacaaaaagatgattacgtggatacaacttatgatcgctgggttgtttcagaaatcgataaccaccaaattatttgggtgatgttaaactatgaatttaatgaagcgagacctactatcggacagtctgatgaagatgaaaaatcagaatagatattaatatataaaccaactaagaatgatttaattcatttttggttggttatttttttgactaaaattaatgaaaagtgaaaatagtattggaactcaatatctttaatgatttaatgaatgttttttattgaaagcgataattcgtattaattgagtttgcttaaaaatttagggtaatgtaaagatataaaagatacatagattggagagatataaagatgttgaatgagatacaaatattaaataatggatacccgatgccttcagttgggttaggtgtttataaaatctctgacgaagatatgactaaagttgtaaatgctgcaattgacgcaggctatagagcgtttgatacagcatacttttatgataatgaggcttcactagggcgagcattaaaggataatggcgtcgatagagaagatttgtttataacaacgaagttatggaatgactatcaaggttatgagaaaacattcgaatatttcaacaaatcgattgaaaatttacaaactgattatcttgatttatttctaatacattggccttgtgaagcagatggtctatttttagaaacatataaagctatggaagaactttacgagcaaggtaaggtaaaagcaataggtgtatgtaattttaatgttcatcatctagaaaaattaatggctcaatcaagtatcaaaccaatggtgaatcaaattgaggtacatccatattttaaccaacaagaattacaagaattttgtgatcgtcacgatattaaagtgactgcatggatgcctttgatgagaaatagaggactactagacgaccctgtcattgttaaaattgctgaaaaatatcataaaacaccagcacaagttgtattgcgttggcatttagcacacaatagaattattattccaaaatctcagacacctaaacgcattcaagaaaatatagatattttagattttaatttagaattaacagaagtagctgaaattgatgctttaaatagaaatgcaagacaaggtaaaaatccagatgatgtgaaaattggggatttaaaataactggatgttaaattttacgtttatgaatgccttttaatgtgtacattaaaataaatgagttggtttttactatttgataaaacaacactcaggtacattcaaaatcttttaaataaaaaggatggacatagatgaaaattagagtcgtcattccttgttttaatgaaggggaagtcattacacaaacacatcaacaattaactgaaatactttcacaagatagtagtgtgaaaggctatgattataatatgcttttcatagatgatggtagtacggataccactatagatgaaatgcaacatcttgccacaatagataggcatgtcagctatatttcttttagtagaaattttggaaaagaagcagctatgattgcaggttaccagcatagtactgaatttgatgcagtcatcatgatagattgtgatttgcaacatccacctgaatatattccgaaaatgattgaaggttttatggaaggctatgatcaagtgattgcaaagcgtgatagaagtggtgaaaattttagtcgcaaaacattaagccatttgtactataagttagttaattgctttgtagaagaagtacaatttgatgatggtgttggtgattttagacttttaagccaaagagctgttaaatccattgcatcacttgaagaatataatcgattttcaaaagggctatttgaatggataggatataatactaaagtgtttacgtatcaaaatgttgcgagacaaaaaggagaatctaagtggtcctttaaaaagttatttaattatggtattgatggattgatttcctttaatagtaaacctttgagaatgatgatatatcttggattatttattttttcaataagcgtgttatatattatatatttattcatcaatattatgatttctggtgttaatatcccaggatatttttcaacgattgcagctattttattattaggcggcatacagttaatttcaattggtgttgtaggtgaatatattggcaggatatattatgaagttaaggcacgtcctaaatatattattcaagctacaaatctttcaagtattgaaaatgatgagaaggatacccataaagtttactctaaataaacaataaaagaagccctcatcaatgagagcttctttttagtctttgcattttattttataaataaatcggattatgacgtaatgtctaatttgtgtaatgtcacagtcatcgtagttcctacatctatatcactgcttacactgatttttgcgttattttgttgcgcgagttcattagctatatataagcctaatccagaaccacccgtttttgtattacgcgagttttctactctgaatgttcgttcgaatatacgttcttgtagttctggtataatgccaataccttcatcgctaatagcaatgtcgatagtatcttgatctttattttcactaatattaatatcaatgcgactaccaacatttgaaaattttagcgcattatcaagtaagtttgttaaaatacgctcaagtggcgttcgatattgataaaatgcatcaatttcgctacagaaattcacttctaatgtgcggttttcatgtttgatacgttgctcatatggttgcaatattgatacaagtaattggtctagttgtattaattctgggggatatgttttacctgtatttaaagtgataatatgagtcatatcatcaaataatgttgataatctgtttgcttgtttaattaatatgtcgtatgactctttaatctcatgatcctttgtgattataccatcacgtagtccttcagaatatgaaataatgcttgctaaaggtgtttttaaatcatgggctaagttttgaatcagttctgttttttcttgttgttcggatttaatttgattcatttgttgcgtaatttcagaagccattttattaaaagattgatttaattcataaatttcttttggtgaattaaacgttttatcattgcttgcgtaatttccgttagcaaattgcttagtttttatattaaactgcttaattttttgtataagtggattaataaaaatactacatattaataaggttaaacagcttgtaattattgtcgttaaggtcaaagttagtgtcatatggccgttaaaccacattaaaatatatgcaattgctaaaatagttgaagttaatagtatactcgatacgacgccaataatgatttgacttctaattgataacaccattatcggctcctttcaaatttatatcctaatccccatacagttgtgatggtatatgttgtaaagctctctttttctaatttttctctaatacggtgtatatggacattcacggtattagcatcttcgtaatagtcatatccccaaactttttcaagtaattctgatttagaaataacttcattttctctagaagctaaataccacaataactcaaattccttaatacgcatagggacttcgtgaccatttacagtcacaactttacttaagttaataagtgttaattcatcaaacgacagttgttcaactggttgatgatggtatttcttcattcttgtaagtaaattattaatacgtaaaacgagttcccttggactaaatggttttttgacatagtcatctgcacctaaagttaaggcgtaaatggtatcatgttcttgtgttttggcagttaaatagataaaggggatatctaatttttgccttttcatttctttgacaatgtcgtaaccattaacttctggcatcatgatatcaagtaccatgatatcaatatcatttgatagtaaagaaattgcttctttaccgctagttgtcgttgttactttgtaaccttcatattcaaaataggtttgacaaatgtctacaatgtcttgttcatcatccacgatcagtaagtgggtcatctattttttcacctctgttcttacgacctctaaagtaattaatgatttctttaagtgaaatctgttttaaaaatgagtgactcattagtaaaaggataaagaaagttaattgaagaggatacgtaaatatcatatctgctaagatataatttatcataacaaaggctccaaagaaactagcagcatatgcaaaaactccaaaaattaaacctaatccaattgcaatctctccgagtgggacaacaatatcaaataatgacgtcgtatgtgcaactatatttgcgaaaaaccacttataccactctggtgaatcagtattgttagcgatgactggtactaaacctttcagcgtaaatccgcccgttaatttttcgtaaccttgcattaacataacaatacctgaacccacgcgaatgataaatgtaacgagtagcaataatttattcatgatgttcacattctttctatattattgtgtgtaatttatataaacataagattaagcaacataatgcgatttatagtgttatgtgaacaggaagtgtttgagctcatgggttgcttaagctaaacaaacctcaagctctaaaaaaatttacttatgtgctctacaatcttatgggatttaatagttgtatatatattgaaaaaaggaaagtatgatttctacaagctaggggggctgtgaaatcatacgctttccattgagtaatgagtgtaatgtatatttttaaaatttgtaatgtatagtaatagtatgttgtaaataaaagtttaactcagaaattgattattttaatttagcgccgccgaagatgacgtgagcttttttacaatagattgttacttcatcatatttgcttaaatctacatttttaagatcaaatgtttgtttttctttatcgtagtcaaccattgcgatttctttaccgtttttaatgtcaccattttttgttaggtagacgtataaatctggaccttttgatgatttgtagttagtaagcattaatttaccatttttaatctcagctttaccttcaacagtttcaccgtttttagaactgaatgtacctgttagatgttttgttttatcagttttaacattgctatcttctgactttgttttttgttcagttttgttaccttgatcttgtgaattagaattaccacaagcgcctaaagctaatgttgtgataacagcaccagctgctaaaaaatattttgtattcatgctaactcctcatttcttcaatttgataagttaagtttaaaatgaaggcaaataatatgccattaactaattcttaacttcgtttaaatatcgcttaactaatattgaagaaagaataatttgaaaatgaaaataattgtctgatttaaataaataggagtcaaaataagaggagggcggttttttaagtgagaaaatatttatctaaactagttatcactataaaacacttctgatatatcgaactaataatatcagaagtgttttatagttttggtattaaaatttataaaccctttgccacaataaaaacaacaagaaaataagatagacgattaaatacaagtaccaatatggtgttaaaaccatcataacgataaatgaaatgttaataatgataagtcctttaatcattagtttctttattttgttattattttcagcagtttcatctaagttattaaatgttgaaataaacaacataataccaccaatgatgaaaatggcaggggctaaaaatggaatagacatatatattgattgtgtacttgaaaagtcggtaacacgttgcgttaaactgacaacaatcgttaatatgatagcaataaatttttggtctgtaatgtatacaggttttaattttttatcaatgtaaaactgtagtatcgtccaaatgataaacatcgttatagtacacagagtaataaagttatatttatcaattatgaatgtatttataaaggcgtttatagtaatagataacaacattgcacttaatgataaatgttgcatttgatgcctatataaattgaatccagttataagtacgacgatagcaatattaattaatatatatacaatcatgatggactcctgttcgttatacttcaatcaactattatatcaattaatatattgttattcattagatatgacttgtaaaaagtaaaataagttatcctttatacaccttttttattgctccaaagtaatgtatgaagttgtggtaacacataaacgtgattcatatcattactttgcataactaaatctaccaactgctcgtagcgttctaacaacttttcggtatgattatctacgctgtctgataaatatgggttaccaacttgtaaatagaagggaatatctggataacggtggtgtatcattttggcaaaatcataatctttatcgtcgaatacaactacttttaagtttaatgaggaaggtacgcattgtgtaatcacttcatctaacttttttaaatcaggtgtcatagttgaacttggtggttttggactaatcgttaaatcatcaatttgtgtcatccaaggttggaatttactgccttgtgtctccagtgcgctgaaaatacctttatcttgaaataagtcaactaactcttggatacctttaattaatgctgggttaccaccagaaattgtaacgtggttaaataaatcgccaccaattcgttttaattcatcataaatttcttcagcggtcatgagttttatatcgcttttagcactaccatcccaagtaaatgcagaatcacaccagctacagcgataatcacatccagctgttctcacaaacatcgtttttctaccgattactcgaccttcaccctgaatggttggaccgaatatttcgagtacaggaattttagccattagttacacctgttcctttggtctaaatacgacataacttgttggtgtttctcttacaaatacttgaatgcattttggttggtgttcgagcgatgccaaattttctttaacaatttgataaattgtttccgctacgatttcagttgaagggattttgtttttaaaagcaggtaagttatttaacagttgatggtcaaatttaccgtgtatcatctttttcaaatggctaaagttcactaaaaagccagtgtcatctagtttatcaccgacaattgttaaattaacaaagtaagtatgaccatggacattttgacaaatacctgcttcttcacacggaatgtgatgtgcagctgaaaaattaaaatctttatttaattcgaattgatatggatgcgttgtactaggatagatttgttgtaacattttaaagcgctcctttactttcaagatattgatttagtccacgttgacgtaaatgacaagctggacattcaccacagccatccccaatgataccgttatagcatgttaatgtttttgtacgaatataatctaaaacttctagttcatcacttaatttccacgtttctgctttgtttaaccacattaaaggagtatgaataacaaaatctttgtccatagctaggcttaatgttacgttcattgattttataaaactatcgcgacagtctgggtagcctgaaaagtctgtttcacatacgcctgtaataatatgcttagccccaatttgataagctagagcgcctgcaaacgacaagaaaagtaaatttctagctggaacaaatgtattaggtataccatcttcattattagtaatttccatatcatgttgtgttaatgcgtttggagtaagttgtgataataatgacatatctaaaacgtgatgtttcattccttgatcttgtgcaatttgtttggcgacttcaatttcagtatcatgtctttggccataattaaacgttacgagttcaacttctttgaaatgtttttttgcataaaagagacatgttgtactgtcttgaccaccactaaagacaacgatggctttttcattatttaatacactttccattttgtaattgctcctatcattaataatattaataaagaggttaatggcattgataagcccgtttttaatttataaaataaaaaaagcctatctccataaaagatagacgaaagaaatgggttgctcctataatatatattaaaggtttaccaacgaatgtttgaaatttcaatgtctagttttttatagagggtttcagctaggaacctctgatattcatttatgtacgatgaatagaatataccatatattagttaaaatcaaggtcaggataatgacaatgcttttaaagttttagctacatccaatacatattataaaaataaaacacatttagaacggagtatacaatgattctagtcatagataataatgattcatttacatataatttaatagactatattaagactcaaacgaaactaacagttcaagttgttggtattgataatctgctgatagaagacgtcattaatatgaagccaaatgcaattgttatttcacctgggccgggtaatccggatgattatcctatcttgaatgaagtgttagaacaattttatcagcgtgtacctatcctaggtgtatgtttaggatttcaatgtatcgtgtcttattttggtggaaatatcattcacggctatcatcctgtacacggacatactacacagttacgccataccaatgaaggtatttttcaaggactgcctcaaaatttcaatgtaatgcgttatcattcattaattgctgacggagcgacttttccaaattgcttaaagattacagcaaaaaacgatgaagcgattattatggcatttgagcatattacatttccggtttttggtgtgcaatatcatcctgaatctattttgagtgaatacggttatcgacaagttgaattatttttatcgaaggtaggtgattactgtgagaatagaatataattatcgctactatttaactgaaaatgaatataagcaataccatattcaattaaagggatttataaagaagtatgttgccactaaattggctgatgtgggagaagtgatacactttgcacaagcgcagcaacgacaaggtagatatgtttcgttatatttaagttacgaagcggcaaagtattttaatcatgttatgtgtacacattcattagctaaagatgatatttatgcagtagcttatagttttgaaaaagcggaaagcataaattcaacatatgaacatcaaacttcttatgtatcaaagcatcatttttcatttgttgaatcttctgaggttatgatgactaatattaaacgtgtccaacaagcaattgttgaaggcgaaacgtatcaagtgaactatacggcgcgcttaacggataacatttattatcctattagtactttatatgaacgattaactcaatttagtaatggtaattatactgcgttattacaaacagatgaaatccaagtagcgtctatctcaccagaattattttttcaaaaaggacagtttaacaatgtcgataacgttatcataagcaaaccgatgaaagggacaatgcctagaggtaaaacggaagctgaagatcaacagtattataaaacattgcaaacttcttcgaaagatcgtgcagaaaatgtcatgattgttgatttactaagaaacgatatagggagaatatcacagagtggctcaattaaggtgtataaactatttttcattgagacatataaaactgtatttcaaatgacttcgatggtaagtggaactttaaaaactaatacagacttaactcaaattttaatatcgttatttccttgtggttcgattacaggtgcaccgaaactgaatacaatgaaatatattaaacaattagaaagttcacctcgtggtatatactgcggagcaattggactattacttccaactgaagatgataaaatgatttttaatattccgattcgtactattgagtataaatatggacaagcgatttatggagtcggagcaggtattacaattgattctaagccaaaagatgaagtaaatgaattttacgcaaaaaccaagattttggagatgttataatgcaattatttgaaacaatgaaaattgataatggacatatccctagacttacttatcatactaatcgcataaaatgttcttccgagcgattaaactttaaatttgatgaacatgcatggcgaaatgaattaaatgatgtaacaacaaagtatcacagtggccaatatagacttaaaatcgtattaaatgctgaaagcaaatttgaaacgatagtgtcacctttacctgagaaaagtagttttacagcaaaatttcaagtgttgcccaaagcagttaatccaacttttataaataataaaacgacagaacgaaagcatttagcacacaatcatgaaacagatttaatattgctaacttcagaggacggcaaggtccttgaatttgatattggcaacattgtcattgaagaggatggaaaatggtacacaccaagttataaaaatgatttcttaaaaggatgcatgcgtgattatttaatagatagtgacaagcttgttgaaaaagactttaataaaaacgaattgatttataaatatcataacaatgagatacgtttatttttgataaatagtttacgagaggttgccgatgtccacctttgcctttaaaattagtatgataataatgtagaaaatgaagtgaaaacaaatttaaaaattaaatggggccaaatatgattattgtttatattgcgctgttgttaattcttgtatacgtgaattatcgattagtgaatcgattgctatctgaaaatagaatatatgttgttcgtttgatagcaacaattactactgttataagctttatccttgtatacgcattaattcgcgaactcatgccttttgttgtgcgagcaatggatttaatgtatcaccagtaaatttagtgagtaggtaaaatgaactattcaatcgattctataattaaaaatcaaagtaaagtaaccaaatattgaagaggtgtacaaatgaaaatatatagtcaaggtgaccaagccattgttgtcgcaattgaaaaagaagtatctaaaagtttaaccgaagatttattaacacttcgctcatatttaattgaacaaaattatccatttattatagaaattgtgccatcagaatcagacatgatgattgtctatgacgcaagggatatgattaaacaccataatatacaatcaccttttttatacatgaaagcactaattgaatcgattcatttaaacataaaacatgattttaaccagcaagatttgattgaaataccaattgtgtatggttcgaaatatggtccggatttagaatcacttttaaaacattacaaaatcaagctagaaacatttattgaattacactctaaggcgcaatattttgtttcgatgatgggatattcacctgggtttccttatttaactggattaaataagaaattgtatattaatcacacgagtaaacagaaaaaattcattccagctggttctgtagtacttgaagggaaaaaatgcggtattgtaactacggatacaattaatgattggttagttattggttatacaccattatcactttttaatccgaaagaatcagatttcgcacgcttaaagttaggcgataatattaaatttagacctatcaatgaaaatgaattagaagtaggagcgtttaaagatgtcaatcataattgaaaaaagtggcttattcagtagctttcaggactttggtagaaggggatatgaacatgatggtgtaattccatgtggtgcactagatactttagcacatgaaattgctaatcgattagttgcaaatgacaagaatgaagcaactttggaaatgactaataaaatggcaacgattcgttttacagaacctacgctgattgcattagcagggggtaatgtcaaagcttacactgagcatatgactatatctccatataaattgtatttgttagataaaggcgatgttttaaaatttagagaaacaagttatacatcgcgagtgtatttagctgtgggaggcggatttgaattagatgcatggttaggatctaattcaaccgactttaatgtaaaaattggtggttttaaaggtagaacattacaagatggcgatgaaataaagcttaagagagattatacagctcgtcatcataagttatttgaaaaccttgctcacacgaaacaaacagattggggtattgatggatacgccttgtcatttaattatatgtctgatgtatttcatgtcgttaaaaataaaggtacggaagattttaaagaagatgccattcaaagatttgtgaaacatgattataaagtaacgagcaaagcaaatcgcatggggatgatgcttgaaggtgaaaaaatcaaagctttttatgaagatatgccaccgtatcagactgtcaaaaaaggaacgatacaaattaagcgtgatggcacacctattatcttattaaatgatcattatacgctaggtagctacccgcaaatcggtacaatcgcaagctatcatttaacgaaattagcacaaaaaccacaaggatcacgtttgaaatttcaatttatagatattttaacggctgaaaagaaccttgttaagtatagtaactggttaaaccaattattccatggaatagaatatagaatgcaattagaaatgatgaaataatatttggtacgtagctcatactagagtccgatgcaaataatttcctcctaatgtataatgaaataatactgtgttttatctgcgaaatgtatcatattctaattcgtttcacagtaaaatgaaaagataaagtgtgtttttacttgaattttgactaaaattactctatatttattaattgagctatgcttattattacaatttgattacaaattttaaatttgttaattgaatgataatattaaataaagaaacttacacaagcaaatatgagttgtagcccaaaatacttgttaaatcaaagttgaaagctacaaataatgaaaattataaacttgaatctgaaagtaattactataattatgacaatgttaacttttaaacgcacttattaattaactacataatgttaatatctaatttattcaagtactttcgcaagatttattatctaaataacgggggaaagaatcatgagttcacaaaaaaagaaaattagtctttttgcgttcttcttattaaccgtaataacgattaccttgaagacgtatttttcttattatgttgatttttctttaggtgttaaaggtttagtacaaaacttaatattattgatgaatccttatagtttagtagcactggttttaagtgtgttcctattctttaaaggcaaaaaagcattttggttcatgttcataggcggcttcttattgacgttcctattatatgccaatgttgtgtactttagattcttctcggattttttaacgtttagtactttaaaccaagtaggtaacgtagaatctatgggtggtgcggttagtgcatcattcaaatggtatgactttgtttatttcattgatacgttagtttacttattcattttaatatttaaaacaaaatggttagacacaaaagcatttagtaagaaatttgttcctgtcgtaatggcggcttcagtagcattattcttcttaaacttagcttttgctgaaactgatagaccagaattattaacacgtacatttgaccataaatatttagtgaaatatttaggaccgtataactttacagtatacgatggtgttaaaactatcgaaaataatcaacaaaaagcgttagcatctgaagatgacttaacaaaagtattaaattacacgaaacaacgtcaaacagagcctaacccagaatattatggggtggcaaagaagaaaaatattattaagattcatttagaaagtttccaaaccttcttaattaataaaaaggttaatggtaaagaagtaacaccgtttttaaacaaattatcaagtgggaaagagcaattcacatacttccctaactttttccatcaaacaggtcaaggtaaaacatctgactctgaatttacaatggataacagtttatacggtttaccgcaaggttctgccttttcattaaaaggagataatacgtatcagtcattgccagcaattttagatcaaaagcaaggctacaaatctgatgtcatgcacggtgactataaaacattctggaacagagaccaagtatataaacactttggtatcgataaattctatgatgcaacatactatgacatgtcagataaaaacgttgtaaacttaggcttgaaagacaaaattttctttaaagattctgctaattatcaagctaagatgaaatcaccattctattctcatttaattacattgactaaccactatccattcacattagatgaaaaggatgcaactattgagaagtcaaacacaggtgatgcaacagttgatggttatattcaaacagcgcgttatttagacgaagcattagaagaatatattaatgacttgaagaaaaaaggattatatgacaattcagtgattatgatttatggtgaccactatggtatctctgaaaaccataacaatgccatggaaaaactattaggtgaaaaaatcacaccggctaaatttacagatttaaacagaactggtttctggattaaaatccctggtaaatctggtggtatcaataatgaatatgctggtcaagtcgatgtaatgccaacaattttacatttggctggtatagatacgaagaactatttaatgttcggtactgatttattctctaaaggtcataatcaagtagttccattcagaaatggtgactttataacaaaagattataaatatgttaatggtaagatttattctaataaaaataatgaactcataactactcaaccagctgatttcgaaaagaataaaaagcaagttgaaaaggatctcgaaatgagtgacaacgtgcttaatggtgatttgtttagattctacaaaaatccagacttcaaaaaggtaaatccttcgaagtataaatatgaaacaggaccaaaagcaaactctaaaaaataatatctaaacacgaactcggattgataaaatatcaatccgggtttttattttgttcttttatattatgttttccattatatgtgttgataaaaaggtatattataaagatcattagcatagtcatcaaagccttatcaatttttatttatagttgaagcaacaatatattaaattatgacacttaacggtatcgatttcttttgatttcaaaaaggtgtataatgtatagaactgatttaagtacgtagagatttcaacagaagaaggaagatgggtatggaagcatataaaattgaacatttaaataaatcttatgccgataagactatattcgataacctagatttatcaatttcagaaggtgaaaaaataggtttggtaggcataaatggtacagggaaaagtacgttgttaaaagtaattggtggtattgatgatgattttacagccaatgttatgcatccaaatcaatatcgaattcgatattcgtctcagaaacaggaccttaatgaagatatgacagtttttgatgcagtattaagttctgatacaacaactttacgtatcatcaagcaatatgagcaggcagtacaagcttatgcggatgaccaaagtgataaattgttcaagcgaatgatggatgcgcaagatgctatggatcaacatgatgcttgggactataacgctgaaattaaaacaatcctctcaaaactaggtatacatgatactactaaatacattaaagaattatccggcggacaacaaaaacgtgttgtacttgctaaaacattaatagaacaaccagatttattgttattagatgaacctacgaaccatttagacttcgaatcaatcagctggttgatcaattatgtgaagcaatatcctcatacagttttattcgtaacccatgatcgatattttttaaatgaagtttccactagaattattgaactaaacagaggtaagttagcgtcatatcctggtaactatgaatcttatattgaaatgcgcgctgaaagagaagtaacaattcaaaagcaacaacaaaaacaacgagctttatataaggaagaacttgcttggatgagggctggagctaaggctcgtactacaaagcaacaagctagaattaatcgatttaatgacctagaaaatgaagttaaccagcaatataaagacgataaaggtgaattgaatcttgcttattcaagattaggtaagcaagtgtttgaattagaagacttatcaaaggctattaatgataaagtattatttgaacatctgacggaaattattcaaaaaggtgagcgcattggtgttgttgggccaaatggagctggtaaaacaacactcttaaatattttgagtggagaagaccaacaattcgaaggtaaattgaagactgggcagacggttaaagtagcttattttaagcaaacagatgagaccctggatagagatattcgtatgattgattatttaagagaagaaagtgagatcgcaaaagaaaaagatggaacctcggtatctattacacaacttcttgaacgatttttatttccaagtgccactcatggtaaaaaagtttataaattatctggtggagagcaaaagcgtttgtatttattacgtctactcgtacaccagccaaatgttctgttgttagatgaaccgacaaatgatttagatactgagactttaacaatacttgaagattatattcatactttcggtggtacagtgattaccgtaagccatgatcgttacttcttaaataaagttgcacagtcatattggtttattcatgatggtcagatggaaaagattataggaacttttgaagattatgaaagttataaaaaatcattagataaaaataaatccacattgaagcaacaatctaaatcttctacaattgtacgtaagaaaaatgggttatcatataaagaaaaattagaatatgaacaattgatgaaacgcatagaacaagcggaagtaagaatggaagaaattgatgtgctcatgattgaggcaagtgcagattatgggaaaattaaagaattaaacgaagaaaaagaacaacttgaaattcaatatgatttagacatcacaagatggagtgagttagaagaaattaaagaacaacaataaggggtcaatttatgatgcaacaaacattatcgcattactttgggtatgaaacgtttcgaccaggacaagaagaaattattagcaaagtattagaccatcgtaatgtgcttggtgtcttaccaactggtggaggtaagtctatatgctatcaagtaccaggtttattgttaggtggtacaacaattgtaataagtccactaatatcattaatgaaagatcaagtggatcaattaaaagcgatgggaattcaggctgcttttttaaatagtagtttgactcaaaaagagcaacaacgtattgaaaaagcattatcaaatggagaaattcaatttttgtatgttgcaccagaaagatttgaaaaccgatattttttaaatatgcttcagcgtataaagattcacttagtcgcgtttgatgaagcgcattgtatatctaaatgggggcatgatttcagaccgagttataaaaacgtcatttctaaagtatttacgttacctcaagattttacaataatagcgttgacagcaactgccacggttgaagtacagcaagatattagagaaaagttaaatatcgctcaaactgatcaaattaaaacgagtactaagcgtagaaacttaatttttaaagtaaatcctacttatcaacgtcaaaaatttatattggattatattaaaacacacgatgaagatgcaggtattatttattgttctacacgtaagcaagttgaagagcttcaagaagccttagaaagccagaaaattgaaagtgttatatatcatgcaggtttgagcaataaagaaagagaagaagcgcagaatgatttcttatttgatcgtgttaaagtagtcgttgctacaaatgcttttggtatgggtattgataaatccaatgtacgttttgttattcattataatatgcctggagatttagaatcttattatcaagaagcgggtcgtgcaggtcgtgatgggttgaaaagtgaatgtattttgttatttagcgaacgcgatatcaatttacacgagtattttataacagtctctcaagctgatgatgactataaagataaaatgggcgaaaagttaactaaaatgattcaatatacaaaaacaaaaaaatgtttagaagcaacaattgtccattattttgaaccgaatgaaaaattagaagaatgtgaacaatgtagtaattgtgttcaacaagataaatcatataatatgacacaagaagctaagatgattattagttgcatcgctcgtatgaaacaacaagagagttatagtgttatcattcaagtgctaagaggagagtcaacagattatattaagtataaaggttatgatcaaatttcaacccatggtttaatgaaaggttacacaacatcagaattaagtcacttaatagatgaattaagattcaaagggttcttaaatgaaaatgatgaaatattaatgtgtgatacttcaattaaaaaattactcagtaatgaagtagaagtattcacaacaccatttaagcaaaaagcgactgaaaaagtatttataaatacggttgaaggggttgaccgagtattattcagtcagttggtagaagttcgtaaaaagttaagtgacaaattaacgatagcacctgtaagtatattttctgattacacgttggaggaatttgctaaacgtaagcctgcttcgaaacaagatatgattaatattgatggcgtaggtagttacaaattaaaacattattgtccagcatttttagaaacgattcaaaattataaagccaaagtatagtgaaggcacctagtaagcattccttgttttactgggtgtttttttgaattcaaggtaaaataacactatttcttaactgttgattacctattattcattattttgttaaaaaagttcaaggataaatcatttaaatttgaaaattgtaataaacgtggttaaatagggaatacatacatataatctcggttttatgctatgagaaaaaaagaggtggcaaagtgattaagtttaaaaatgtaactaagcgttatgacaaacatgttgctgtcgataacattagtttcgatattaatgaaggtgaattttttgtactaattggaccttcaggttgtggaaaaactacgacattaaaaatgattaatcgactcattcacttaagtgaaggttatatttattttaaagataaaccaataagtgattatccagtatacgaaatgcgttgggatattggatacgtattgcagcagattgcattattcccacatatgacaatcaaagaaaatattgcacaagtgccacaaatgaaaaagtggaaagaaaaagatatagataaaagagtagatgaattacttgaaatggttggattagaacctgaaaaatataaaaacagaaaacctgatgaattgtcagggggacaacgacaacgtgtaggagttatacgtgcgttagcagctgatccaccagttattttaatggatgaaccgtttagtgcattagacccaatcagccgagaaaaacttcaagatgatttaattgaattacaaactaaaattaagaagacaatcatatttgttacacatgatattcaagaggcgatgaaacttggtgataagatttgtcttttgaatgaaggtcatattgaacaaattgacacaccagaagggtttaaaaataatcctcaaagtgaatttgttaaacaatttatgggtagtcatttagaagatgatgcgccatgtgttgaagagaacgcaattatccgtgacttggatattatgaaaccaatcgatgaggttacatctatgagcgcttatccaattgtttatgacaatcaacaaattgaagtattgtatcaatatttatcagagagcgagcgtgtcattgtcatgcaagaagatagcataggtcaatatgttattgataggaaagatatcttcaaatatttgtcccagaaaaaggaggtagctcaacatgactaactttttcgacatattgagtgaacgtaaggggcaactattttcgacaatgatagaacatattcaaatatcatttatcgcattattgattgcaactgctattgcggtaccattaggtattttattgacgaagactaaaacgatatctgaaatcgtaatgaatattgctgcaattcttcaaaccataccatcgttggcattattaggtttaatgattcctttatttggtatcggtcgtgtgccagcaattatcgcacttgtagtgtatgcgttgttaccaattttaaggaatacgtatactggaattaaagaagttgatccatcactcattgaagcggctaaaggtataggtatgaagccatttagacgtttaactaaagttgaacttccaatagcaatgcctgttataatggctggtgtaagaacggctatggtattaattataggtacagcaacactagcagcattaattggtgcaggcggactaggagatttaattttattaggtatagaccgtaacaatgcatcattgatattattaggtgcaattccagcagccttattggcaattatatttgatttaattttaagatttatggctaaattatcttataaaaagttattgatgacgttaggtgttatagtgatgattattatactggccatcgctattcctatgtttgcacaaaaaggtgataaaattacgttagctggaaagcttggctccgagccttcgattattacaaatatgtataaaattttaatagaagaagagaccaaaaatactgtagaagtgaaagatggtatgggcaaaacagcatttttatttaatgctttaaaatctgacgatatagatgggtatttagagtttactggaacagttttaggtgaattaacaaaagaaccattgaagtcaaaagaagagaaaaaagtttataaacaagctaagcaaagtcttgaaaagaaatatcaaatgactatgttaaaaccaatgaagtataacaatacgtatgctttagctgtaaaacgtgattttgctaaacaacataatatacgtacaattggtgatttaaataaggttaaagatcaacttaaaccaggatttacattggaatttaatgatcgtccagatggttacaaagctgttcaaaaggcttataatttaaatttagataacatacgtacaatggaacctaagttgagatatcaagcgatcaataaaggtaatattaatttaatagatgcatattcaactgacgctgaattaaaacaatatgatatggttgtgttaaaagatgataagcacgtatttccaccatatcaaggagcaccattatttaaagaaagctttttaaagaaacatccagaaattaagaaaccgttaaacaaactagaaaacaaaatatctgatgaagatatgcaaatgatgaactataaagtaacagttaaaaatgaagacccatatacagttgcgaaagattatttaaaagcaaaagggttaatcaaataacgaccaacgccacataagatgaggggcacgccattatatcttatgtggcgttgttatatttaaatctataattatgttcaatttaaacatgcaataatgattaaaaaatatgacatgttaaacacaatgtaagttattatgatgtgaaaatagtagcattgcattttagaaacatagagcgatataatgaatataagttttttaaaatttcagttaattctaaggaggttgtttttattatgaaagaacaacttaatcaactatcagcatatcagcctggtttatctccaagggcattgaaagaaaagtatggcattgaaggagatttatataaacttgcatcaaatgaaaatttgtatggaccatcgcctaaagttaaagaagcgatatcagcacacttagatgagttatattattatcctgaaacaggatcaccgacattaaaagcggcgattagtaaacatttaaatgtagatcaatcacgcattttatttggtgcgggattagatgaagttatattaatgatttctagagcagtattaacgccaggggatactattgttacaagtgaagcgacattcggtcaatattatcacaatgcgattgttgaatcagctaatgtgatacaggtacctttaaaggatggtggcttcgatttagaaggtattttaaaagaagttaatgaagatatgtcattggtatggttatgtaatccaaataatcctacaggtacatattttaatcatgagagcttagattcgtttttatctcaagtacctccacatgtaccagtaattatagatgaagcttattttgaatttgtgacagcagaggactacccggatacacttgctttgcaacaaaaatatgacaatgcattcttattacgtacattttcaaaggcgtatggattagcgggtttacgtgtaggatatgtggtagcaagcgaacatgcgattgaaaaatggaacatcattagaccaccatttaatgtgacacgtatatctgaatacgcagcagttgcagcacttgaagatcaacaatatttaaaagaggtaacacataaaaatagtgttgaacgcgaaagattttatcaattacctcaaagtaagcatttcttaccaagtcaaacgaattttatatttgtaaaaacaaagcgggtaaatgaactttatgaagcacttttaaatgtagggtgtattacgcgaccatttccaactggtgttagaattacaattggttttaaagaacaaaatgataaaatgttagaagttttatcaaactttaaatacgaatagtaagtggggagtgggacagaaatgatattttctcaaaatttatttcgtcgtcccaccccaactagcattgtctgtagaaattgggaatccaatttctctgtgttggggcccatccccaacttgcacattattgtaagctgacttttcgtcagcttctgtgttggggcccctgactagaattgaaaaaagcttgttacaagcgcattttcgttcagtcaactactgccaatataactttgtagagcattgaacattgatttatgtctcaagctcaatgcagtgtgaattatgaggtgagagtattcagtgtaaaaagcaacaatagatgatattgttttgtatcaattgcttttttgctatactgaatcaatactgatattttgaggagaagattaaaatgacccgtaaatcaatcgcgattgatatggatgaagtattggcagatacattaggagaaatcattgatgctgtcaattttagagcggatttaggtattaaaatggaagctttgaatggtcaaaaacttaaacatgttattcctgaacatgatggattaattacagaagtattgagagaaccaggcttcttcagacatcttaaagtgatgccgcatgcacaagaagttgtgaaaaaattaactgaacattatgatgtatatattgctacagcagcaatggatgtaccaacatcatttagtgataaatatgaatggttactagagttctttccatttttagatcctcagcattttgttttttgtggtagaaaaaacatcgttaaagctgattatttaatagatgacaatcctagacagcttgaaatttttactggtacaccgattatgtttacagcagtgcataatattaatgatgatcgatttgaacgcgtaaatagctggaaagatgttgaacagtattttttagataatattgagaaagaaaaataaatcacttgaagcctttcatatagcaaataaaatgcatatactggggcccaacatagagaaattggaatgccaatttctacagacaatgcgagttggggtgggcccccaacataaagaaatactttttctttagaaattagtatttcttatgcatgagtgtaactcatgcaatcctatttttaagtacacattagctgtgactaatgataaagaatcgctacataatcaaccattagtcgttctttatcatttctgtcccactctcagtaaatgttagtctatctcattattataaatcggatgaatgtgttaatctatggcagattacacgtcatccgattttttatagaatttgaaaaagacgcataaaccactatgatttaaaatacaatatcaatcattttagtggcatgcgccaaaattatatgtctgtttttgaaacagggtaatagcttaaagctaataacagtgaatataatgtacgttgaatcttatgattacactttaaacctaatataatatcccgttaagatcattccggatgcttacaaatcattgacagtaagtaactgaatggcatttggtataatctcaatatcaataggtgtttctaatgaaatttcgccatcaatatcaactttcattgctggatctgttgtaagtgaaatctttttaccaggtatatgctcaataccttgagtaatttcattccaattcatgctatcacgctttttaaaaatatcatttaaaatactgaaactttgttcattaaaaatgaaagtgttcagttcaccatcttgaggagacaaatcagtcaatggtatacgactaccaccaatgaatggaccatttgctgatagtatcatggtcgtttcgccagaatatgtcttatcatcaattgttaattgataattaaattgtgttggatttagcagtgttttgacagttgatccaatataactcaatttaccaaatatatcttttgaaccatcttgtacgttttcagcgttttgaacaattagacctaagccaacaaagttgagtgcatattgattatttattttaattacatcgtatgtaccaacttgtgcagaaatcatttgttcactagcttgtttatgattaggtgctatatttagcgtctttgtaaaatcattaaaagtaccgcctggtaaaattccaataggaagttgaaggtcatgtgtcataacaccatttataagttcgttaaccgtgccatcaccgccaagaataaataatatatctacatcttttgcatagtttttagttttgatttcttggcaatatttaataatgtcaccttcgttttcactcaattgaatagaaagatgcttacaaattgaacttaatgctgttgtaacttccccaataccttgattaatattttttaatccactgtgttcatggtaaaagaggacaccatgtgtatatttattttccatagtttagcctactttctaaaaattggttcattaaatatatatacccacttttaattgttaataccaaaaatatgtttttaaatagagaaaatggtaataactgacattgatgtctatagtggaatgtgaaaatataattactaattagattgtttagttgtctataacgagcatattaagcttttatttatactgatatcttgaatttaattaatagaaacctataaaaaaacagtaagccatttaaatgacttactgttttttgaattaggccaacaatattaacgtatacctttcatcgctttgatgattaaaggtgagaatgctaatacaattgttgtaacaataattgcaacaacacctaggaaaataaagtaatttgtttgacctagtggttctattaacttaactaaagtaccattgattgcttgtgcagaagcgttagttaagtaccaaatactcatcatttgggcattaaatgctttaggtgctaacttaacagcagcactattacccgttggtgataagcaaagctcaccgataacacaaataatgtaagataaaataacccagttaactgagaagtttgatgaacctgatgcataacctacaataccaattagtatgtatgacgcacctgctaagaacgtaccaattgcaaattttactggcaggctaggttgtttagttccaagcttttgccataaaagtgaaataattggagctaataataaaataaataatgggttaattgattggaagatcgcttcaccaaagtttgttttccaaccaaataagtttaatttcatatctgaatgttcaattccataaatgtttaatacattagacccttgttcttggatagcccagaacaccattccaagaataaataatggaataaatgctttaacgcgagaacgttcagtatcagtgacatctttacttctaataattaaagtgaagtaaatgattggtaatgcaatacctaatactaaaacagtattactaactaagttaaatgataatgagttagttaatgcaccaataacgataattaaaacaattgctaaaacaacacttccgataataagaccatactttttcttttcagctggtgtcaatgggttagtaggtttcataccaacgctacctaagtttttgcggttgaaaagtacataccatactaaacctaatgccataccaactgctgcaatcaagaatccgccgtggaagtttttaacattaacaaagtgttgcaaaataataggtgataataatgcacccatattaactgacatatagaaaataacaaaacctgcatccatacgtctatcattttcaggatataaacggccaacgatatttgaaatgtttggcttcattaaacctgaaccaataatgatgaagaacattgatgtgaataagccgattaatgcaaatggtaagcttaaacaaatatgtccgataataataaatacggcacctaataaagtagcgcctctagtgcccgtaattctgtcagcaatccatccgcctggtattgatgtcatatagattaatgaaccataaactgacataattgacatagctgttgttttatcaattccaaggccattatctgttacggcaaagtacatgtagaaaatgagtagggcacgcatgccataataactaaacctttcccagaactctacaaagaagagtacgcctagtcctcgaggatgcccgaaaaatcctgtttgaggtatgtcttgaatttgatttccatgggagttttgttgtgtcatttatacatcccatcctttcttcccctaatacaatagtttaagtaaatttgattgtgccttatcaactaaatattccacaaatcacaaaaaaataaaaatattgagaatattctgttattaagcgcgcacaattaattagagataatataaaaatatacttattgacgttaaagtgcaataggtttctataaaaatgttgtttaattcgtgtactaatattcttttggtgtactttggtataaaatgttattttaatgtaacctattatgtatgctaaatgaaaaacacaccaataagttaggaaaatcaacttattggtgtgtttattaaatgatacatttaacgattatctatttttttcgggatataaatcatgattcattaaacgatgctcagccattttttcatatttagaatttggacgtccatagtttgtataaggatcaatagaaattccaccacgtggtgtgaacttgccccagacttcaatataatgtgggtccataagctctatcaaatcattcataataatattcatacaatcttcgtggaaatcaccgtgatttctaaaactaaataagtataatttcaaagattttgattcaaccattttaacatttggaatatatgaaatatagatagttgcaaaatctggttgcccagtaatcggacataatgatgtgaattctggacagttgaattttacgaaatagtcacgaccttgatgcttattatcaaatgattctaatacatcaggacggtagtcaaaattgtaagtattgttttgatttcctaataaagttatatcttgtaattcatcttgttgacggccatgtgccatataaagcgctcctttaaatttatttttttattattttggcgtctcggcgtgctttttcaaacatgtaataacttgcaccgataataacgacgtaacctaatgttgcatagaaatctggagattctccgaatagaataaatccaagtattgctgtgaaaattatagatgcatacgtgaaaatagaaatatcttttgctgctgcaaaactatatgctaatgtaacaccaatttgacccacagcggcagctaagccagcccctaataggtaaagtatttgcatttgactcattggttcataggtatatgcagtgaaaggtattaaaacgatgacagaaaataaggagaagtaaaatactatagtatacggtgcttctcttgtactaagtgctcgaacacatgtatatgctgatgctgcaaaaatacctgagaataagccagctaatgatggaatcatagatgatgaaaattcaggtttcactattaaaagcatacctaaaatagcaattatcattgctgttatttgatacttccttaccttttcatgtaagaaaacaatgcttaataaaatcgtccagaaaggattgagtttcattaatgaatcggcatcactaagtaccatatgatcaatggcataaatatttaacaatacaccaataagtccaagtgttgatcgtgttattaataagggttgacttgaaagtctgccaaacattggctgatggtatttatatataaaaaataatggaataaacattgctactaagtttcgtgctaatgatttttgaaaaacaggaaggtcacctgcaagtctgaaaaacactgacataaaactgaaaccaatagccgaaattaaaatggcaatgataccttttactttaggattcaattttatcgcctcttttatataaaattaacgtatttatattagcataaaacaacatgttgtgcataaatagttgaaatttactataaaaagactataatagactgtaccgaacaaacgttctgtgtttatttgtcggaataatagggcattacacttttatgaatgtttgtgttattacataaaacaaatatcaattcagtatcaagctaataagctttttcttgatttctgttgatacaattgagattgacacagatttaaaaaaatcaagtgatatctactaaaaaaattttttaaatttgttcaagtttttctaatttagtattggtgcctagttggaacgttttacgaacattcgattagaaaatggcactttaaatcatagtgtgtcttatgtataatgaaacacataatatagtgttggtgaaacgaaaaagacacaatatcttgtgttttgtatgcaaatgctttatttatgaagaaattacatttaaaagtaatttaacacagaaatttaatagttattatcaattaatagtcatatttttagaaaatgtactgagcaaatggaagatatccaatgatgtaaacactacatatagtgatttttatacattcaacccatataagctactattttctcaaatataaatctatgcaattggtttacatttgagaaaataagtagcttcattatagttaatacaatgctgagataaccatagtaaccatgttgttaaagcattttttaattgtaatgactactttatttaaaagggttgaagaaagaaggtgatccaatgaaaataatatatttttcatttactggaaatgtccgtcgttttattaagagaacagaacttgaaaatacacttgagattacagcagaaaattgtatggaaccagttaatgaaccgtttattatcgttactggcactattggatttggagaagtaccagaacccgttcaatcttttttagaagttaatcatcaatacatcagaggtgtggcagctagcggtaatcgaaattggggactaaatttcgcaaaagcgggtcgcacgatatcagaagagtataatgtccctttattaatgaagtttgagttacatggaaaaaacaaagacgttattgaatttaagaacaaggtgggtaattttaatgaaaaccatggaagagaaaaagtacaatcatattgaattaaataatgaggtcactaaacgaagagaagatggattctttagtttagaaaaagaccaagaagctttagtagcttatttagaagaagtaaaagacaaaacaatcttcttcgatactgaaatcgaacgtttacgttatttagtagacaacgatttttatttcaatgtgtttgatatttatagtgaagcggatctaattgaaatcactgattatgcaaaatcaatcccgtttaattttgcaagttatatgtcagctagtaaatttttcaaagattacgctttgaaaacaaatgataaaagtcaatacttagaagactataatcaacacgttgccattgttgctttatacctagcaaatggtaataaagcacaagctaaacaatttatttctgctatggttgaacaaagatatcaaccagcgacaccaacatttttaaacgcaggccgtgcgcgtcgtggtgagctagtgtcatgtttcttattagaagtggatgacagcttaaattcaattaactttattgattcaactgcaaaacaattaagtaaaattgggggcggcgttgcaattaacttatctaaattgcgtgcacgtggtgaagcaattaaaggaattaaaggcgtagcgaaaggcgttttacctattgctaagtcacttgaaggtggctttagctatgcagatcaacttggtcaacgccctggtgctggtgcagtgtacttaaatatcttccattatgatgtagaagaatttttagatactaaaaaagtaaatgcggatgaagatttacgtttatctacaatatcaactggtttaattgttccatctaaattcttcgatttagctaaagaaggtaaggacttttatatgtttgcacctcatacagttaaagaagaatatggtgtgacattagacgatatcgatttagaaaaatattatgatgacatggttgcaaacccaaatgttgagaaaaagaaaaagaatgctcgtgaaatgttgaatttaattgcgcaaacacaattacaatcaggttatccatatttaatgtttaaagataatgctaacagagtgcatccgaattcaaacattggacaaattaaaatgagtaacttatgtacggaaattttccaactacaagaaacttcaattattaatgactatggtattgaagacgaaattaaacgtgatatttcttgtaacttgggctcattaaatattgttaatgtgatggaaagcggaaaattcagagattcagttcactctggtatggacgcattaactgttgtgagtgatgtagcgaatattcaaaatgcaccaggagttagaaaagctaacagtgaattacattcagttggtcttggtgtcatgaatttacacggttacctagcaaaaaataaaattggttatgagtcagaagaagcaaaagattttgcaaatatcttctttatgatgatgaatttctactcaatcgaacgttcaatggaaatcgctaaagagcgtggtatcaaatatcaagactttgaaaagtctgattatgctaatggtaaatatttcgagttctatacaactcaagaatttgaacctcaattcgaaaaagtacgtgaattattcgacggtatggctattcctacttctgaggattggaagaaactacaacaagatgttgaacaatatggtttatatcatgcatatagattagcaattgctccaacacaaagtatttcttatgttcaaaatgctacaagttctgtaatgccaatcgttgaccaaattgaacgtcgtacttatggtaatgcggaaacattttaccctatgccattcttatcaccacaaacaatgtggtactacaaatcagcattcaatactgatcagatgaaattaatcgatttaatagcgacaattcaaacgcatattgaccaaggtatctcaacgatactttatgttaattctgaaatttctacacgtgagttagcaagattatatgtatatgcgcactataaaggattaaaatcactttactatactagaaataaattattaagtgtagaagaatgtacaagttgttctatctaacaattaaatgttgaaaatgacaaacagctaatcatctggtctgaattagcagatgattagactgctatgtctgtatttgtcaattattgagtaacattacaggaggaaattatattcatgatagctgttaattggaacacacaagaagatatgacgaatatgttttggagacaaaatatatctcaaatgtgggttgaaacagaatttaaagtatcaaaagacattgcaagttggaagactttatctgaagctgaacaagacacatttaaaaaagcattagctggtttaacaggcttagatacacatcaagcagatgatggcatgcctttagttatgctacatacgactgacttaaggaaaaaagccgtttattcatttatggcgatgatggagcaaatacacgcgaaaagctattcacatattttcacaacactattaccatctagtgaaacaaactacttattagatgaatgggttttagaggaacctcatttaaaatataaatctgataaaattgttgctaattatcacaaactttggggtaaagaagcttcgatatacgaccaatatatggccagagttacgagtgtatttttagaaacattcttattcttctcaggtttctattatccactatatctagctggtcaaggaaaaatgacgacatcaggtgaaatcattcgtaaaattcttttagatgaatctattcatggtgtatttaccggtttagatgcacagcatttacgaaatgaactatctgaaagtgagaaacaaaaagcagaccaagaaatgtataaattgctaaatgacttgtatttaaatgaagagtcatacacaaaaatgttatacgatgatcttggaatcactgaagatgtgctaaactatgttaaatataatggaaacaaagcactttcaaacttaggctttgaaccttattttgaggaacgtgaatttaacccaatcattgagaatgccttagatacaacaactaaaaaccatgacttcttctcagtaaaaggtgatggttatgtattagcattaaacgtagaagcattacaagatgatgactttgtatttgacaacaaataataataaaaattaaaaagaccttcacatgaaagggcaaagcgatgacattcgcttccgacatgttgaaggtcttttctctatgcttaaaaacgtatgcacattttgaaaaagtaaaaatggcatttaatgatgtcaatgaggctagaaagtatacaagatattgcattacaaaagggtgttctattttactttaagtaaacaaaatacacattctgaaaaattaaatttcagtttaattgcaaatatcaataaaattgacactaaattatttgaaaggctattgaaattagggtaaaaaaacgctactattaatgagaaatattatcaatgataatgattatcattaatttaaagggagaaaaatttgtaatgaagtatttattaaagggaaatattttgcttctattactaatattgttgacaattatttcgttgttcataggtgtgagtgaactatcaattaaagatttactacatttaactgagtcacagcggaatattttattctcaagccgaataccaaggacgatgagtattttaattgctggaagttcgttggctttagcaggcttgataatgcaacaaatgatgcaaaataagtttgttagtccgactacagctggaacgatggaatgggctaaactaggtattttaattgctttattgttctttccaaccggtcatattttattaaaactagtatttgctgttatttgtagtatttgcggtacgtttttatttgttaaaatcattgattttataaaagtgaaagatgtcatttttgtaccgcttctaggaattatgatgggtgggattgttgcaagtttcacaaccttcatctcattgcgcacgaatgctgttcaaagcattggtaattggcttaacgggaactttgccattatcacaagtggacgctatgaaattttatatttaagtattcctcttttagcattgacatatctttttgctaatcatttcacgattgtaggaatgggtaaagactttactaataatttaggtttgagttacgaaaaattaattaacatcgcattgtttattactgcaactattacagcattggtagtggtgactgttggaacattaccgttcttaggactagtaataccaaatattatttcaatttatagaggtgatcatttgaaaaatgctatccctcatacgatgatgttaggtgccatctttgtattattttctgatatagttggcagaattgttgtttatccatatgaaataaatattggtttaacaataggtgtatttggaacaatcattttccttatcttgcttatgaaaggtaggaaaaattatgcgcaacaataataaaaaaataatgcttttaattgcagtaacgttattaattagtatgctgtacttatttgtaggtattgattttgaaatatttgaatatcaattttcaagtcgtttaagaaagttcatattaattattttagtaggtgctgccattgcaacttcagtggtgatttttcaagcgattacaaataaccgtctattgacaccatcaataatgggattagatgcagtttatttatttatcaaagtattgccagtctttttatttggaattcaatcggtatgggttactaatgtatatttgaactttatattaacacttataacgatggtgttattcgcactaatcctattccaaggtatctttaaaattggacatttttcaatttattttatcttacttattggtgtccttttaggaacattttttagaagtattacaggttttattcaattgattatggatcctgagtcatttttggcgatacaaagtagtatgtttgcaaattttaatgcatctaattcgaatttagttacattctcagcagtgctattagtaatattattagtcattacaattttactattgccttatttagatgtattgcttttaggtcgtgctgaagcaattaatctggggatatcgtatgaaaaattaacgcgaattctacttgtaatagtctcagttttagtttctgtgtcaactgcattagtaggaccaattacatttttaggtttattaactgtaaatctagcgcatgaactaatgaagacgtatgaacataagtatattttaattgcgacaatttgcttgagttggattagtttatttagtgcgcaatgggtagttgaaaatgtgtttgaagctacgacagaaatgagtatacttattgatttgattggtggaagttatttcatttatctattagttagaaggagaaatgcgcaatgattcaagttggaaatttaactaaaactataaataatcaaatgatattggaagatattagcatagatatcgaaaaaggtaaattgacttctttaattggacctaatggtgcgggtaagagtactttactttcagcgatttgtaggttaattcgttttgataacggtgaagtgaaaatagatggacggctcatgtctgattataaaaataatgacttgtcgaaaaaaatatctatattaaaacaaacaaaccatactgaaatgaatattacggtagagcagttggtaaactttggacgattcccttattctaaaggtcgtttgacgaaagaggatcatgatattgtcaatgatgcgctagatttgttgcaactacaagatatcagaaatcgtaatattaagtcattatctggtggacaacgtcagcgtgcatatattgcaatgacaatagcacaagatactgaatatattttgctagatgaaccattaaataatttagatatgaagcatgctgttcaaattatgcaaacgttaaaaatgttagcgcataaaatgaataaagcgattgtcattgtattacatgatattaactttgcgtcctgttattcagatcagattgtagcattgaaaaacggacaactagttaaatcagatttgaaagataatgtcattcaaagtaatgttttaagtgatttatatgacatggatattcaaattgaacatataagaaatcaaaggatttgtttatattttaaggattgataatttggagacactttaaaggggtgatgcgccaattaaagaagggttaaacgtaaagcatttatttatatttcacatcaagcacacagattaagccaaaagaggagaatattatattatgaagaaaacagtcttatatttagtattagcagtaatgtttttattagcggcatgcggtaacaattctgataaagaacaatcaaaatcagagactaaaggttctaaagatacagtgaaaattgaaaataactataaaatgcgtggcgagaaaaaagatggtagtgacgctaaaaaagttaaagaaactgttgaagtaccaaaaaatcctgaaaatgcagttgtgttagactatggcgcattagatgtaatgaaagaaatgggcttatcagacaaagtaaaagcattacctaaaggggaaggcggtaagtcattaccgaatttcttagaatcatttaaagatgataaatatacaaacgttggtaatttaaaagaagtgaattttgataaaattgctgcgacgaaacccgaagtaatctttatctctggacgtacagctaatcaaaagaatttagatgaattcaaaaaagctgcacctaaagcgaaaattgtttatgttggtgcagatgaaaagaacttaattggttcaatgaaacaaaacactgaaaatatcggtaaaatctacgacaaagaagtcaaagctaaagaattaaataaagatttagataataaaattgcttcaatgaaagataaaacgaaaaacttcaataaaactgttatgtatttactagttaacgaaggtgaattatcaacatttggacctaaaggtcgttttggtggattagtttacgatacattaggattcaatgcagttgataaaaaagtaagtaatagcaatcatggacaaaatgtttctaacgaatatgttaataaagaaaatccagatgttattttagcgatggatagaggtcaagcggtaagtggtaaatcaactgcgaaacaagcattaaataatccggtattaaaaaatgttaaagcaattaaagaagacaaagtttataatttagatcctaaattatggtactttgcagctggatcaactacaactacaattaaacaaattgaggaacttgataaagttgtaaaataattttaaaagaggggaacaatggttaaaggtcttaatcattgtttccctcttttctttaaaaaaggaaatctgggacgttaatcaatgtcctaaactctaaaatgttctgttgtcagtcgttggttgaatgaacatgttcttgtaacaagctcatttcaataccagtgggctccaaacatagagaatttcaaaaaggaattatacagaagtggtgctttatcatgtctgtctcacttcctataatgttttggctatgttgtttaaatttcaaaataaatatgatagtgatatttgcagcgattgttaaatcgagattggcaattaggacaacgctcaaccatcatatattcattgattgttaattcgtgtttgcatacaccgcataagattgctttttcgttaaatgaaggctcagaccaacgcttaatggcgtgcttttcaaactcattatggcacttatagcatggatagtatttattacaacatttaaatttaatagcaataatatcttcttcggtaaaataatggcgacagcgtgtttcagtatcgattaatgaaccataaactttaggcatagacaaagctccttaacttatgattcctttggatgttcaccaataatgcgaacttcacgatttaattcaatgccaaatttttctttgacggtcttttgtacataatgaataaggttttcataatctgtagcagttccattgtctacatttaccataaaaccagcgtgtttagttgaaacttcaacgcctccaatacggtgaccttgcaaattagaatcttgtatcaatttacctgcaaaatgaccaggcggtctttggaatacactaccacatgaaggatactctaaaggttgtttagattctctacgttctgttaaatcatccattttagcttgtatttcagtcattttaccaggagctaaagtaaatgcagcttctaatacaactaagtgttctttttgaataatgctattacgataatctaactctaattcttttgttgtaagtttaattaacgagccttgttcgtttacgcaaagtgcatagtctatacaatctttaacttcgccaccataagcgccagcattcatatacactgcaccaccaattgaacctggaataccacatgcaaattcaaggccagtaagtgcgtaatcacgagcaacacgtgagacatcaataattgcagcgccgctaccggctattatcgcatcatcagatacttcgatatgatctagtgataataaactaattacaatgccacgaataccaccttcacggataataatatttgagccatttcctaaatatgtaacaggaatctcattttgataggcatatttaacaactgcttgtacttcttcatttttagtaggggtaatataaaagtcggcattaccacctgttttagtataagtgtatcgttttaaaggttcatcaactttaattttttcatttgggataagttgttgtaaagcttgatagatgtctttatttatcacttctcagtacatcctttctcatgtctttaatatcatatagtattataccaattttaaaattcatttgcgaaaattgaaaagaaagtattagaattagtataattataaaatacggcattattgtcgttataagtattttttacatagtttttcaaagtattgttgcttttgcatctcatattgtctaattgttaagctatgttgcaatatttggtgcttttttgtattgaattgcaaagcaatatcatcattagttgataagagataatcaagtgcaagataagattcaaatgtttgggtattcatttgaatgatatgtagacgcacctgttgttttagttcatgaaaattgttaaacttcgccatcataacctttttattatatttatgatgcaaacgataaaaccctacataatttaagcgtttttcatctaaggatgtaatatcatgcaaattttctacacctactaaaatatctaaaattggctctgttgaatatttaaaatgatgcgtaccgccaatatgttttgtatattttactgggctgtctaagaggttgaataataatgattcaatttcagtgtattgtgattgaaaacaattagttaaatcactattaatgaatggttgaacatttgaatacatgataaactcctttgatattgaaaattaatttaatcacgataaagtctggaatactataacataattcattttcataataaacatgtttttgtataatgaatctgttaaggagtgcaatcatgaaaaaaattgttattatcgctgttttagcgattttatttgtagtaataagtgcttgtggtaataaagaaaaagaggcacaacatcaatttactaagcaatttaaagatgttgagcaaaaacaaaaagaattacagcatgtcatggataatatacatttgaaagaaattgatcatctaagtaaaactgatacaactgataaaaatagtaaagaatttaaggcactacaagaagatgttaaaaaccatctcatacctaaatttgaagcatattataagtcagcaaaaaatttgcctgatgatacaatgaaagttaagcaattaaaaaaagaatatatggcgcttgcaaatgagaagaaggatgcgatatatcaattaaaaaaattcataggtttatgtaatcaatctatcaagtataacgaagacattttagattatacgaaacaatttgaaaaaaatagatacaaagttgaatcagaaattaaattagctgataataaaagtgaagcagctaatcttacgacaaaattagaacataataataaagcgttaagagatactgcgaaaaagaacctagatgatagtaaagaaaatgaagtaaaaggcgcgattaaaaatcacattatgccaatgattgaaaaacaaattaccgatattaaccaaactaatattagtgataagcatgttaataatgcaaggaaaaacgcaatagaaatgtattacagtctgcagaactattataatacacgtattgaaacaataaaggttagtgagaagttatcaaaagtcgatgtagacaagttgccgaaaaagggtatagatataactcacggcgataaagcctttgaaaaaaagcttgaaaaattagaagaaaaataactataatcatttttcaaagttaaaaattttgaatttatggttaacatgtcaacttactatgtgtataatggtaaacattgatattaactatatgtataaaaatgtcacgcagatgctatttaaatgtgataaatatttttagaggtgaatagagtggctataaagctaagttcaattgaccaatttgaacaggttattgaggaaaataaatatgtttttgtattaaaacatagtgaaacttgtccaatatcggcaaatgcgtacgatcaatttaataaatttttatatgaacgcgatatggacggttattatttgattgtccaacaagaacgcgatttgtcagattatattgctaaaaaaacgaacgttaaacatgaatcacctcaagcattttattttgtaaatggtgaaatggtttggaatcgagaccacggtgatattaatgtgtcgtcattagcacaagcagaagaataatgaaactatagggttggaacatattgccttacactactagacgtgaatagcacaacttaaattcgtgtgaatcagagtagtttggctataatgatgttctgaccttttattttatataacctttagaagcagttaagttagtacttttttacaaacatatgtataatgtattcgagtatttttattgaaaatattttggaaaacgacgaatccgataaaaaaatttaaacatgatttgtaagttagtttaataggaaatatatgctaaaccagaagaagcatattgttatttactgggataattaataatcatgtcatgttaaatgttcgcatataatcacgagataaaatctgaaatttaagattaatcttttatgaataaaaaacgtatcacaacaaataataaagtaaggtggtcaaggttatgaaagtattagtagccatggatgagtttcatggaattatttcgagttatcaagctaatagatatgttgaagaggcagttgcaagccaaattgaaactgcagatgtagttcaagtaccattgtttaatggaagacatgaattattagattctgtatttttatggcaatctgggcaaaagtatcgtataccagtacatgacgcagatatgaatgaagttgaaggtgtttacggacaaactgatacagggatgaccgttatcgaggggaatttatttttaaaaggtaaaaagccaattgttgaacgaacaagttatggtttaggagaaatgattaaccatgcattagataacgacgcaaaacatgttgtaatttcattaggtgggattgatagttttgatgctggtgcaggtatgttacaagcattaggtgctcaattctatgatgacgaaggacgtgtcgtagatatgagacaaggtgctggtgtaattaaatatattcgtcgtatggatatgtcgaacttacaccctaaaatggaaacagcaagaattcaagtaatgtcggatttttcaagtcgattatatggtaagcaaagtgaaatcatgcaaactcatgatgcgcatcagttgaatcataatcaagcagcagaaatcgataatttaatttggtattttagtgagttatttaaaagtgaattgaaaattgcaattggtccagttgaacgtggtggtgctggtggtggaattgcagcagtcttgaatggactgtatcaagctgaaatattaaccagtcatgcattagtagaccaactaacacatttagaaaatttagttgaacaagcggatttaattatttttggagaaggattaaatgaaaatgatcagttgctagaaacgacaacattgcgtattgcagaactttgtcataaacatcaaaaggttgccattgcaatttgtgcaactgctgaaaagtttgatttatttgaatcacaaggggttacagcaatgtttaatacatttatcgatatgccggaaacttatactgactttaaaatgggattacaaattaggcattatactgttcagtctttaaaactgttgaaaacacattttaatgttgaggtttagtaaagaaggactaaattggtgatgctgtcatgatggttaataacatttatgatggttagcaaaacaaattagaagatcgaaagtatacgtaaaaaatatgaaaaatcacgctatcattgcactgaatgttagcgtgattttttttattaattaagcctgagttgaactagtatataatcgtttgtttttagtgattttcagcgatatcttctacaattccaatgattacttgtactgctttttccataacatcaatggatgcatattcatatgggccgtggaagttaccgcaacctgtaaagatgtttggagttggtaatcccataaatgacaattgtgaaccatctgtaccaccacgaataggttcagtgtttgctggaatatctaatttagcaaagacacgtttaggtatatcaataatatgaggcaatggtaatattttttctgccatattgaaatattgatccgatatatcaactttaactggataattttcaaaatgggcattgatatcgtcacgtatttctaaaatacgtttcttacgcaattcgaattgttttttatcatgatcacgaataatgtattgcaaagttgctttttcaacagttccttcaaagttcattaagtgataaaagccttcgtatccttctgttcgctccggaacttcactatcaggtagcaaactatcgaattgttcacctaaacgtattgcgtttaccattgcatttttagctgaaccaggatgaacattcacaccgtggcatgtaataaccgcttcagcagcgttaaagctttcatattgtaattctccatattgactaccatccatagtataagcaaaatcagcattgaagcggtcaacatcaaatttatgtggaccacgaccgatttcttcgtctggtgtaaatccaatgcgaatggtaccatgtttaatttctggatgttcttgtaaataacagatagcttccataatttccacaatacccgctttatcgtctgcacctagtaacgatgtaccatcagttaccattaatgtatgaccaacaaaactgttaagttctggaaatactttaggatctaagacacgtttagtattgcctagtttgtatggcttaccatcatagttttcaataatttgcggtttaacatttgaagcattgaaatcaggtgatgtatcaacatgcgccaaaaatccaactgttgggacgtctgcatcgatgttactttctaatgtagcaaataagtagccattttcatctaaatcagttggcaatcctaattgttgtaattctttttctaataaatgtaacaaatcccattgcttttcagttgaaggtgttgttgtagattttggatcagattgcgtatcaattgtcgtatatcttgttaatctatctatcaattggttcttcattatattcgaccccttaaactctattattcatgttgtaagattttttatatgtcttacctttgattttaccatatagctgtttgatacgtgtgtacaggtaatatagaatttcagaaactaatataccgaaagcaatcgcacctgaaatcagtgtaacttctaaaaatgtatttacagcacttgtataatcattcgatactaaaaaacgagtcgcttgataagctgcaccaccaggtactaatggtataatgcctggcactatgaatataattaccggtcgtttatatctgcgactcatagtatgactcattaagcctaaaattaagcttcccaaaaatgaagcgccaacttttccaaactctaaatctaccgttaattggtaaatcgtccatgcaatggcacctacaaatccacatgctactaagaggcgtttgggtgcattgaaaatgatagagaaaagtactgttgatataaagctgattgtaaaatgaaataaataaaatagcatgctttaacagtccttccttaaatgattaataaaacgattgcgacaccagcaccgattgcgaatgctgttaatgcagcttcaacaccgcgagacatacctgcaagtaattcacccgctaataaatctcgaatggcattggtaattaatataccagggacaagtggcatgacactggctatagtaatgatatcttgattggttgcaatacctaatttagtaaatgtggctgcaatggatatgaccacagcggctgcaacaaactctgagaaaaatttaatttgtatatagcgttgtacaaagctgaatgttaaaaatgcggatccaccagcaatgactgcaatccaacaatctgatgcaacaccaccaaacataaataggaagaagccacatgcaatggcagctgcaaagaaattcgttaaaaaagaatattgtaatgatgcatgctgtaaatgaataaattcagatttagcttcatcaattgtgagttctttatttgatattttacgtgaaagactattcgttaaagcgattttctctaaatctgttgtacgctcttgtacacgaattaatcttgtacttgtacgatcgtttaatgaaaaaataattgcagttgaactgacaaaactatatgtattatgaagaccataactatgtgcgatacggttcattgtatcttcaactcgatatgtttcagcacctgattcaagtaaaattctacctgcaattaatacaacatcaatcactttgttttcatctataattgtgattgaatccggcatatcaattcacctccaatgaaatgtgttatttatttgaacaattgaagtttacaacttgttgttgcaactttcaatagtgagactttgtgttagtatgatgaacttgtatggttcaaatttaaataagaaaaactgttaatctttgctattatactatgatttaataatagcaaaggattaacagttttgtcgttgttataaattgataatagggttaaacattactttgtttcgcccttgatttttggctacatgcaccatatcgtctgcatctttaaacactttacgctgtgattttggatcatcatctgttagataaccaacaccgatagacactgacaatttaataacttctttgtttggtaaatggaatgatgatttttcaacacctgaacgaatattttcagctaatttaacactttgatcaagtgaatagttgtgaatgacaactgagaactcttcgccaccatttctaaaaattttaaattgattcggcacatagtttttaagtaattgagacatttgttttaacacagcatcacctgatttgtgtgagtaggtatcattgacatctttaaatccatcgatatcgattaataataatgcgatactttgatgttctttttcagcttttcgtgaaatttcatttaaatgtctatcaaattcttttacattacctaagcctgttaagtaatcatatttatcttcgttttcataacgatttacgagtgagaagaaatgccaaatatcgacaaatgttatcgctgaagctaaagtgataattaatgaaattggtattaaaatgataacttccgatagtgtgtaaataggactcactaatgcgacaccaaataaaatgattattgtaacaacattaagtattaataatgatagcacatcattttgttttaaaaatggtccaatagcacttgttactgcggcaataacaatcaacgtaacaccgtacataatcgagttgttaaatactacaatttcaacaattgctacaattactgtggcagataatgtatagaccatatttgtaaatctacctaaaaacaataaaggaacgaatgttaagtgaattaaataatcttcacgataagggatagggtagacagataataataatgatacgattgtcattaaaacagtgacataagccttagaaaaaaccatacgtttgttttctgaatactgtaagcgatggaataaatagattccagcgactataacagatatattgtatataaatgcttcgaacatgtctgaatcgactcctttaattgaccactagctattgtaagtgaaaacttacaatttgtcattagtttacatataaaattaatgtatgatatagactttgatgttaaaatgttgccttaaatgatatgatgaaaaaatgaataataggcgatatataagaaatgaatcgtatagttgtaaatatgatatcattgattgagcgaattaatttataataaagctataagatatacgtagaaaatagatatatcattctataaagacaatattaaataaatataacgttaaaaacaattaatatcgatgaaggtgaataaatggttacattattactagttgcagtaacaatgattgtcagtttgacgataacaccaattgttattgcaatatcgaaaagattaaatttagttgataaaccaaattttagaaaagtacacactaaacctatttcagttatgggtggtacagtgattctcttttcatttttaataggtatttggattggtcatcctattgaaacagaaatcaaaccacttattattggtgcgattattatgtacgtacttgggcttgtagatgatatctacgatttgaaaccgtatataaaattggctggtcaaattgccgctgccttagtagttgctttttatggtgtgactattgattttatttcgttgcctatgggtacaacgattcattttggatttcttagtattccaattactgtgatttggattgttgctattacaaatgcaattaacttaattgatggactcgatggtttggcgtcgggtgtttctgcaataggactcattacaataggattcattgcaattttacaagctaatattttcataacgatgatttgttgtgttttattaggctctttaattgggtttttattttacaatttccatcctgccaaaatatttttaggtgatagtggggctttaatgattggatttatcatcggattcctttctttactcggattcaaaaatattacaattattgcattgttcttcccaattgttatcttagcagttccattcattgatactttgttcgcaatgattcgacgtgtgaaaaaaggacagcatataatgcaagctgataaatcgcatttgcatcataaactattagctttaggctacacacatagacaaacagtattattaatctattcaatctctattttatttagtctttcgagcattatcttgtatgtatcgccaccattaggtgttgtattaatgtttgtattaatcatatttagtattgaattaattgttgaatttacaggattaatagataacaactaccgaccaatattaaatttaattagtcgtaagtcatctcataaagaggaatagggaatgaaagcatagctgtatgggataatttgtattatatggctttactctttacaattttttatgtattaaatttcaaatataaaaaagcactgccataaacgtgtacttcaattgtcgtttaataatacgcaattgatatttaccatcttatgatagtgctttttatttttattcagttggtatatcgaaaggcaactgctttggagtttcttcagtcaaatcgaaatttccagcagtcatttgatttaaaaagttaataaacgcttcatagtcacttttaacgacatcgatatagtagcttaccttatcagtgtaagtttggtttcttaacataaaatgagttgaagctaattcatattcaaatttaccagtttgatcataattcagtgttactatacatggtactgcttctcgtagttcgacacgtccgatatcataaatgacgtctctaacagcaccgctataggcgcgaattaaaccgccaccacctaatttaataccaccaaaatatcttgttactacgacacacgcattatgaacatcgagcttttttaatatgtctaacattgggacaccggcagttcctgtcggttcaccatcatcatttgctttttgaatattcatttcaggtccaatagtatatgcagaacaattatgagtggcatctttatgttctttttttattgcagcaataaatgctttagcttcatcttcattttgaacaggtttgatatgagcaatgaatcttgatttactaatcacattttcaataatgtgttcttttttaacagtaatgatattttgtgtcataataactccttaattcataagcttaagattatttaatcttcattatacactgaaaatgacatgactataaatcgtttgattgccattttctttttaactgaaatattgtatcattgctatgagtatattttaggaggacgactatgaaaattgctgtgatgaccgattctacaagttatctgtcgcaggacttaatcgataaatataatattcaaatagcgccattaagtgtgacttttgatgatgggaagaactttacagaaagtaatgaaatagcaattgaagaattttataataaaatggcatcgtctcaaacgattccaacaacaagccaaccagcaattggcgaatggattactaaatatgaaatgttaaaagatcaaggttacacagatatcattgtcatttgcttatcaagtggaattagtggaagttatcaatctagttatcaagcaggggaaatggttgaaggtgttaatgtacatgcatttgatagtaagcttgcagcaatgattgaaggatgttatgtattacgtgctattgaaatggttgaagaaggatacgaaccacagcaaattattgatgatttaactaatatgcgtgaacacacaggtgcgtatttaattgttgatgacttaaagaatttacaaaaaagtggtcgaattactggtgctcaagcatgggttggaacattattgaaaatgaagccagttcttaagtttgaagatggcaagattataccagaagaaaaagttcgtactaaaaagcgtgccattcaaacattagaaaagaaagtattagatattgtaaaagactttgaagaagtaactttatttgtcataaatggagatcatttcgaagatggtcaagcgttatacaaaaagttacaagatgattgtccttcagcttatcaagtagcatactctgagtttggtccagttgttgcagcacatttaggttctggtggattaggtttaggctatgttggcagaaaaataagattaacataattataaaattttaataaaagagtctatattgtaattggaaattatatctcgtatacatggctttaaatgttcatcatttgaaagtcaaaatgctaaagatataagaaaatcattataatattaggctcttttttacgttgaaatgaggttttaagcattaaacattacgggaaattaattcatcctcatacttcacttactaatgaaaaaattaaaaaagaagtaacaggtgtcatcaaacaaaattcaaactattattgtgttcaatgtgaaagtacaaatccaaagcatttttatcagtatgattcctcagtacattccaagaaaattgtatattgcagaaattgtatatcactgggtcgaatggataatgtaacaagatataaaataacagagagttcgcaaagtgcatcacaagcatattatcatctctcatttgaattgtcggaacagcagtcttatgcctcagaacatattgttcgagccattagaatgagacaaacgattttgttatatgcagtaacaggtgcaggtaagacagaaatgatgtttcaaggcattcaatatgcaagacgacagggagataatatagctattgtgtcaccacgtgtagatgttgttgtagaaattagtaaacgtattaaagacgcatttcttaatgaagatatagacatactacaccagcaatcaagtcaacaatttgaagggcattttgttgtatgcacagtgcatcaactttaccgattcaaacagcactttgatactatttttattgatgaagtcgatgcctttcctttatcaatggataaaagtttacaacaagcattgaagtcatcttctaaagttgaacatgcaacgatttatatgacagcaacaccaccgaaacaacttctgtcagagattcccaacgaaaatataattaaattgccagctcgctttcataaaaaatcacttccagttcctaaatatcgctatttcaaacttaataataataagattcagaaaatgttatatcgaattttacaagatcaaattaataatcaacgttatacattggtgttttttaacaatatagaaacaatgattaaaacattttcggtttataagcagaaaattactaaattaacatatatccatagcgaggatgtttttcgctttgaaaaagttgaacaattaaggaatggacatttcgatgtcatttttactacgacaatattagaacgtggatttacaatggcaaatttggatgttgttgttatcgatgcacatcaatatactcaagaggctttaatacaaattgctggacgtgttggacgaaaattagaatgtcctactggaaaagtattgttttttcatgaaggagtaagtatgaatatgattcaagcaaaaaaagagattcaaaagatgaacaaattagcattaaaaagaggttggattgatgaataattgtttgagttgtggtgctaagttatatgaaaatataaccatttataatttgttcaagaaacctaatagattatgtgacagatgcaaagagaattgggacaatattaaacttgatattaaagcaaggcgatgttcaaggtgcttaaaacacttaaatcaagatgaagcgtattgtttagactgcaagtttctatcggcacactttaatttaatggaacaattatattgtcaatttcaatatgacggtttaatgaaagagatgatacatcagtataaatttttgaaagactattatttatgtgaattattggcacatttgattgaaataccacaaacatcttatgactatattgtgccaattccttcttcgccggcacatgatttatctagaacatttaacccggtagaagcagtactaaaagctaaagggattcgctttgataagattttaaagatgtcaaatagaccaaaacagtctcatttaactaagaaagagcgtctggcagatgaaaatccatttattattgatacggaattagatttaaacggcaaggaaatattactcgttgacgatatttatacaactggattaacaattcatcgtgcagggtgtaaattatatgctaaaaatatcagaaaattcaaagtgtttgcgtttgcacgatagcgtaaaaatgttaaaatataataaagagttaccaataaagaggtttaaggagagattactatgattagatttgaaattcatggagataacctcactatcacagatgctattcgcaactatattgaggaaaaaattggtaagttggaacgttattttaatgacgtaccaaatgcagtggcgcatgttaaagttaaaacttattcaaattcagctactaaaattgaagtaacaattccgttgaaaaatgttacgttaagagctgaagagcgaaacgatgatttatacgcaggtattgatttaattaataataaacttgaaagacaagttcgaaaatataaaacacgtattaatcgtaagagccgtgatcgaggagatcaagaagtgtttgttgccgaattacaagaaatgcaagaaacacaagttgataatgacgcttacgatgataacgagatagaaattattcgttcaaaagaattcagcttaaaaccaatggattcagaagaagcggtattacaaatgaatctattaggtcatgacttctttgtattcacagacagagaaactgatggaacaagtatcgtttaccgccgtaaagacggtaaatatggcttgattcaaactagtgaacaataaattaagtttaaagcacttgtgtttttgcacaagtgcttttttatactccaaaagcaatttctgactatttcatagttcgataatgtaatttgttgaatgaaacatagtgactatgctaatgttaatggatgtatatatttgaatgttaagttaataatagtatgtcagtctattgtatagtccgagtcgaaaatcgtaaaatatttataatataatttattaggaagtataattgcgtattgagaatatatttattagtgataaacttgttgacaacagaatgtgaatgaagtatgtcataaatatatttatattgattctacaaatgagtaaataagtataattttctaactataaatgataagatatattgttgtaggccaaacagttttttagctaaaggagcgaacgaaatgggatttttatcaaaaattcttgatggcaataataaagaaattaaacagttaggtaaacttgctgataaagtaatcgctttagaagaaaaaacggcaattttaactgatgaagaaattcgtaataaaacgaaacaattccaaacagaattagctgacattgataatgtcaaaaagcaaaatgattatttagataaaattttaccagaagcatatgcacttgttagagaaggctctaaacgtgtattcaatatgacaccatataaagttcaaattatgggtggtattgcaattcataaaggtgatatcgctgagatgagaacaggtgaaggtaaaacattaacagcgacaatgccaacatacttaaatgcattagctggtagaggcgttcacgttattacagtcaatgaatacttatcaagtgttcaaagtgaagaaatggctgagttatataacttcttaggtttgactgtcggattaaacttaaacagtaagacgacagaagaaaaacgtgaagcatacgcacaagacattacttacagtactaataatgagctaggttttgattacttacgtgataacatggtgaattattctgaagatagagtaatgcgtccattacattttgcaatcattgatgaggttgactcaattttaattgacgaggcacgtacgccattaattatttctggtgaagctgaaaagtcaacgtcactttatacacaagcaaatgtttttgcgaaaatgttaaaacaggacgaagattataaatacgatgaaaaaacgaaagccgtacatttaacagaacaaggtgcggataaagcagaacgtatgttcaaagttgaaaacttatatgatgtacaaaatgttgatgttattagtcatatcaacacagctttacgtgcgcacgttactttacaacgtgacgtagactatatggttgttgatggcgaagtattaattgtcgatcaatttacaggacgtacaatgccaggccgtcgtttctcggaaggtttacaccaagctattgaagcgaaagaaggcgttcaaattcaaaatgaatctaaaactatggcgtctattacattccaaaactatttcagaatgtacaataaacttgcgggtatgacaggtacagctaaaactgaagaagaagaatttagaaatatttataacatgacagtaactcaaattccgacaaataaacctgtgcaacgtaacgataagtctgatttaatttacattagccaaaaaggtaaatttgatgcagtagtagaagatgttgttgaaaaacacaaggcagggcaaccagtgctattaggtactgttgcagttgagacttctgaatatatttcaaatttacttaaaaaacgtggtatccgtcatgatgtgttaaatgcgaaaaatcatgaacgtgaagctgaaattgttgcaggcgctggacaaaaaggtgccgttactattgccactaacatggctggtcgtggtacagatatcaaattaggtgaaggcgtagaggaattaggcggtttagcagtaataggtacagaacgacatgaatctcgtcgtattgatgaccagttacgtggtcgttctggacgtcaaggtgataaaggggatagtcgcttctatttatcattacaagatgaattaatgattcgttttggttctgaacgtttacagaagatgatgagcagactaggtttagatgactctacaccaattgaatcaaaaatggtatcaagagctgtagaatcagcgcaaaaacgtgtagaaggtaataacttcgacgcgcgtaaacgtatcttagaatacgatgaagtattacgtaaacaacgtgaaattatctataacgaaagaaatagtattattgatgaagaagacagctctcaagttgtagatgcaatgctacgttcaacgttacaacgtagtattaattactatattaatacagcagatgacgagcctgaatatcaaccattcatcgactacattaatgacattttcttacaagaaggtgacattacagaggatgatatcaaaggtaaagatgctgaagatattttcgaagtcgtttgggctaagattgaagcagcatatcaaagtcaaaaagatatcttagaagaacaaatgaatgagtttgagcgtatgattttacttcgttctattgatagccattggactgatcatatcgacacaatggatcaattacgtcaaggtattcacttacgttcttatgcacaacaaaatccattacgtgactatcaaaatgaaggtcatgaattatttgatatcatgatgcaaaatatcgaagaagatacttgtaaatttattttaaaatctgtagtacaagttgaagataatattgaacgtgaaaaaacaacagagtttggtgaagcgaagcacgtttcagctgaagatggtaaagaaaaagtgaaaccaaaaccaatcgttaaaggcgatcaagttggtcgtaacgatgattgtccatgtggtagtggtaaaaagttcaaaaattgccatggaaaataaatgatataaaataactccttccaattaaacacctatagtttgtgttatgggaggagtctttttattttacaagcgttaaataatttaaaaaatgtgaagaagttgttaaacgttgttatgtacttagttttaaaaaataggtttaggcatatgtctatgataaatgtactgttttttaacaataaaagcataaactaattgtcagtgtgcttatatttcttaacattgttatttaacaaaattatgttaaaatttagcattataaaagatacaaatcaatgacttgaattataaataggagcgaaggctatggaattatcagaaatcaaacgaaatatagataagtataatcaagatttaacacaaattagggggtctctttgacttagagaacaaagaaactaatattcaagaatatgaagaaatgatggcagaacctaatttttgggataaccaaacgaaagcgcaagatattatagataaaaataatgcgttaaaagcaatagttaatggttataaaacactacaagcagaagtagatgacatggatgctacttgggatttattacaagaagaatttgatgaagaaatgaaagaagacttagagcaagaggtcattaattttaaggctaaagtggatgaatacgaattgcaattattattagatgggcctcacgatgccaataacgcaattctagagttacatcctggtgcaggtggcacggagtctcaagattgggctaatatgctatttagaatgtatcaacgttattgtgagaagaaaggctttaaagttgaaactgttgattatttacctggggatgaagcggggattaaaagtgtaacattgctcatcaaagggcataatgcttatggatatttaaaagctgaaaaaggtgtacaccgactagtacgaatttctccatttgattcatcaggacgtcgccatacatcatttgcatcatgcgacgtaattccagattttaataatgatgaaatagagattgaaatcaatccggatgatattacagttgatacattcagagcttctggtgcaggtggtcagcatattaacaaaactgaatcggcaatacgaattacccaccacccctcaggtatagttgttaataaccaaaatgaacgttctcaaattaaaaaccgtgaagcagcaatgaaaatgttaaagtctaaattatatcaattaaaattggaagagcaggcacgtgaaatggctgaaattcgtggcgaacaaaaagaaatcggatggggaagccaaattagatcatatgttttccatccatactcaatggtgaaagatcatcgtacgaacgaagaaacaggtaaggttgatgcagtgatggatggagacattggaccatttatcgaatcatatttaagacagacaatgtcgcacgattaatatatattttaaaaccgaggctctaaaagggcatcggtttttggtttttttaaaggtagcgaaataaattgtaaattagattttgaaatatgatttgtttatgaatatttaagtacaattcggtagatagggttagaaaatattttttaaaagttgtgtttgttaaaacaacatatgcagtgtgcatttagtaatattacctatggcaattttcaaggtattgaattaattattgaaaacgttctcaattacatgatatgaatacattttacactatgataaaaggttgtattctttttatattgttaaccatttgattacatcgttataacaatagcttttgacaaaatgtattgtgctatagtatttgcatacttaaaatactaacagcaaaggaatgacagcaagatgaaaaaatctcttacagtgacagtttcgtcagtattagcttttttagctttaaataatgcagcacatgcacaacaacatggcacacaagtaaaaacacctgttcaacataattatgtatcaaatgttcaagcacaaacgcaatcaccgacaacttatacagtagttgctggcgattcattatataaaattgctttagagcatcacttaacgttgaatcaattatattcatacaatcctggtgtaacacctttaatttttcctggtgatgtgatttcacttgtgcctcaaaataaagtgaaacaaactaaagtggttaaatcgccagtaagaaaagcaagccaagctaaaaaggtagtaaaacaacctgtacaacaagcgtctaaaaaagtagtagttaagcaagcacctaagcaagcagtagctaaggcagttaatgtagcatacaaacctgctcatgtacaaaaatcagtaccaactgtacctgttgcacataactacaataaatcagttgctaacagaggaaacttatatgcttatggaaactgcacatattatgctttcgatcgtcgtgcacaattaggtagaagtataggaagtttatggggcaatgcaaataactggaattacgcagcaaaagttgcaggatttaaagtagataaaacaccagaagttggcgctattttccaaacagctgctggtccatatggacatgttggtgttgttgaatctgtaaaccctaatggaacaattactgtttcggaaatgaactatgctggatttaatgttaaatcttcaagaacaattttaaatccaggaaaatataattacatccactaagtaatatatcaagacaagactatcctcttagcctgtttaagtaacaggttaagaggattttttggtatcatttaatcagagttatataaagaagatatttaaatgatacttaattgaatgatatgtaaaaagaaagtataatttatgattaattaatggaggaggtaattgaaatgggtgtacatcaatattttaaaagattatcagatatggaaagacttataagattacctggaaaatttaaatattttgaacacaatgttgcagcacactcctttaaagtaactaaaattgctcaatatctagcaacagttgaagaatatcatggacgaaagattaattggaaaagcttatatgaaaaagcattaaatcatgatttcgctgaagtgtttactggtgatataaaaacacctgttaaatatgcgagtagtgaattaaaaaaattattttcgcaagttgaagaagaaatggtagagacctttattgaagaagaaattccattacaatatagagatgtttataagcaacgactgcaagaaggtaaagatgattcattagaaggccaaatactttcagttgctgataaaattgatttactttatgaaacatttggagaaatacaaaaacgtaatcccgaagaattatttttcgaaatttatgaaatgagtctagaaacaattattcaatttgaccatttagcatctgtacaagattttattaataatatcattccagaaatgttaactgaaaactttatacctagaacagaattaagagaaacaaccatgaacattttaaataaaagaaaagaggaaaatgaatgatatggtattttagcgcagcattctttccatgtgtcctggtagtattgtttagtgtaataacaagaagtaaatgggtcggtactattctgacattaattttaatcggtgcctcaatctataaagagtatttccataacgagtggattatttttattgatgtagtgtcattattagctggttatttaattatagatcaactcgaatttcataaacatcaagatgaagatcgctaagattaactttaaaataatgtttcaaacaaatttgttgaaacaaaacgatgattaatataatgtgtatttacatactaaaaataacaagataaacgatttgatttaaggcaagcatagttagcacaactatgtttgtttttctttgttcgacatttttacgaacaaacgtttgctttttgtgtgactactttgctaaaatatgtaatgagaaagcgaagagttgagcggaaatataaataatacgttgaaagaggaggcatatgtgacaatggttgaacattatccttttaaaatacattctgattttgagcctcaaggtgaccaaccgcaagcaattaaggaaatcgtggaaggtattaaagcggggaaaagacatcaaactttattaggtgcaactggcacaggtaaaacatttacgatgagtaatgttattaaagaagttgggaaaccaacgttaattatcgcgcataacaaaacattagcaggacaattatatagtgagtttaaagaattttttcctgaaaacagggtggaatactttgtaagttactatgattattatcaacctgaggcatacgtaccgtctactgacacttttattgaaaaagatgcctcaatcaatgatgaaattgatcaactacgacattctgctacaagtgcgttatttgaacgcgatgatgtaattattattgctagtgtaagttgtatatatggtttaggtaatcctgaagaatataaagatttagtagtaagtgttcgagttggtatggaaatggatagaagcgaattacttagaaaacttgtagatgtgcaatatacacgtaatgacatcgatttccaacgaggaacgtttcgagtgcgtggtgatgtagttgaaatattcccagcctctaaagaagaactttgtataagggttgagtttttcggcgatgagattgaccgtattcgagaagttaactacctaacaggtgaagtgttgaaagaaagagaacattttgcgatattcccagcttctcacttcgtaacacgtgaagaaaagttgaaagttgcgattgaacgtattgaaaaagaattggaagaacgattgaaagaattacgagatgagaataaattactagaagcgcaaaggttagaacagcgtaccaactatgatttagaaatgatgcgagaaatggggttctgttcaggaattgaaaactattcagtacatttaacgttgcgaccactaggttcgacaccatatactttattggattactttggcgatgattggttaataatgattgatgaatcacatgtgacgttaccgcaagttcgtggcatgtataatggagacagagcacgaaaacaagttttagttgatcatggatttagattaccaagtgcgttagataaccgcccacttaaatttgaagaatttgaagaaaagactaaacaacttgtgtatgtatctgcaacgcctggtccatacgaaattgaacatacggataagatggttgaacaaattattcgtcctactggtttactggaccctaagattgaggttagacctactgaaaatcaaattgacgatttattaagtgaaattcaaacaagggttgagcgtaatgaaagagtacttgttacaacgctcactaaaaagatgagtgaagatttaaccacatatatgaaagaagcaggcattaaagttaactatctacattctgaaattaaaacattagaacgaatcgaaataattagagacttacgaatgggtacatatgatgttatcgtaggtattaatttattaagagagggtattgatataccagaagtttctctagttgtcatattagatgcagataaagaaggatttttacgttctaaccgctcattaattcaaacaataggtagagctgcgcgtaacgataaaggtgaagtcattatgtatgccgataaaatgactgattcgatgaagtatgcaattgatgagacacaacgtcgtcgagaaatacagatgaaacataatgaaaaacatggtattacacctaaaacaattaataaaaaaatacatgatttaattagtgctactgttgaaaatgacgaaaataatgacaaagcacaaactgtgatacctaagaagatgacgaaaaaagaacgtcaaaagacaatcgacaatatagaaaaagaaatgaaacaagcagcgaaagatttagatttcgagaaagctacagaattaagagatatgttatttgaattaaaagcagaagggtgacaagtaaatgaaagaaccatccatagtagtaaaaggtgctcgtgcgcataacttgaaagatattgatatcgaactacctaaaaataaattaattgttatgacaggattatctgggtcaggtaaatcgtcattagcattcgatactatatatgctgaaggacaacgacgttatgttgaatcattaagtgcctatgcgcgtcaatttttagggcaaatggacaaaccagacgttgatactattgaaggattatcgccagcaatttcaatagatcaaaaaacaacaagtaaaaatccaaggtcaacagttgcaacagtaacagaaatatatgattatatacgtttgttatatgcacgtgttggtaaaccttactgtccaaatcacaatatagaaattgaatcgcaaacagtacaacaaatggttgaccagattatggaattagaggcacgtacaaagattcaattattagcacctgtcatcgctcatcgtaaaggtagtcatgaaaagctaatcgaagatattggtaaaaaaggttatgtacgtttaagaatcgatggcgaaattgttgatgtaaatgatgtacctacattagataggaacaagaatcatacaatagaagttgttgtagaccgattagttgttaaagatggaattgaaacacgactagctgactctatagaaactgcgttagagctttcagaaggacaattaacagtcgatgtcattgacggggaagaccttaagttttcagaaagccacgcttgtcctatatgtggattttcaatcggagaattagaaccaagaatgtttagctttaacagtccttttggtgcttgtccaacatgtgatggcttaggtcaaaagttaacagtcgatgtagacttggttgttcccgacaaagataagacgctaaacgaaggtgcaatagaaccatggataccgacgagttctgatttttatccaacactgttaaaacgtgtttgtgaagtttataaaatcaatatggataaaccttttaaaaagttaacagaacgtcaacgtgatattttattgtatggttcgggtgacaaagaaattgaatttacatttacacaacgtcaaggtggtactagaaaacgaacaatggtcttcgagggtgtagttcctaatataagtagacgattccatgaatcaccttcagaatatacacgtgaaatgatgagtaaatatatgaccgaactaccttgcgaaacttgtcatggaaagcgattgagtcgtgaagcgttatctgtttatgtaggtggtttaaatattggtgaagtagtcgaatactcaatcagtcaagcgctgaactattataaaaacattaatttgtcagaacaagatcaagcgattgcaaatcaaatattgaaagaaattatttcccgactcacttttttaaataatgtgggacttgaatatttaacgctaaacagagcttcaggtacactttcaggtggtgaagcacaacgtattcgattggcaacgcaaattgggtcacgtttgactggtgtcttatatgtattagatgagccatcaattggactgcatcaaagagataatgatcgattaattaatacacttaaagaaatgagagatttaggaaatactttaattgtagttgaacacgatgatgatactatgcgtgcggctgattacttagtggatatagggcctggtgctggtgagcatggaggacagattgtttctagtggtacacctcaaaaggtaatgaaagataaaaaatctttaacaggacaatacttgagtggtaagaaacgtattgaagtacctgaatatcgcagaccggcttcagatcgtaaaatttctatacgtggagctagaagtaacaaccttaaaggggttgatgtggacataccactatcaatcatgacggtcgttacaggtgtatcaggttcaggtaaaagctcattagtaaatgaagtattatacaaatcattagctcaaaaaatcaataaatctaaagtaaagccaggattgtacgataagattgaaggtattgatcaacttgataaaattattgatattgatcaatcaccgataggtagaacgccacgctctaatccagcaacgtatactggtgtgtttgatgatatacgtgatgtgtttgcgcaaacaaatgaagctaaaattcgaggatatcaaaaaggccgttttagttttaatgtaaaaggtggacgctgtgaagcttgtaaaggtgacggtattattaaaattgaaatgcattttttacctgatgtttatgttccttgtgaagtgtgtgatggtaaacgatataatcgtgagacactagaggttacttacaaaggtaaaaatattgctgacattttagaaatgactgttgaggaagcaacacaattttttgaaaacattcctaagattaagcgcaagctacaaacactagttgatgttggtcttggatacgtcacattaggtcaacaagctacaacgttatcaggtggtgaggctcaacgtgtgaaacttgcatctgaacttcataaacgttcaactggtaaatctatttatatcctagacgaaccgacaacagggttacatgttgacgatattagcagattattaaaagtattaaaccgattagttgaaaatggtgacactgttgtaattattgagcataacctagatgttatcaaaacagcagactatattatagacttaggtcctgaaggtggtagtggcggtggtactattgttgcgactggcacacccgaagatattgctcagacaaagtcatcatatacaggaaagtatttaaaagaagtacttgaacgagataaacaaaatactgaagataaataagattaaaagaagtgaaggatgttataaatttatccttcgcttctttttattaatttagtaatgaatagtagaaagaaaagatgcataaaaagaattatgttaagatagggtcaatctagagtagctaaacataaatcgaactgggagtgggacagaaatgataaagaatcactaatgatttattatgtagtggttctttgtcattagccacagctattgtgtacttaaaaataggaatgcatgagtgcaactcatgcataagaaatactaatttctaaagaaaaagtatttctttatgtcggggcccctgactagaattgaaaaaagcttgttacaagcgtattttcgttcagtcaactactaccaatataacttcgtagagcttaggtcattgatttatggctcggacttttatggcgatatgaaccatgtaaattaagcaagcaataaattaatgattgatattgacttgtaaaataataacaataatgaacaattaatatttattttagcttttcaatgtagattggtgttatatttttgatatgataagaagagatgtaagagtagggataaatacaattgaggtgaacccatgttaacgacagaaaaactagttgaaacattaaagttagatttaatcgctggtgaagaaggactatcgaagccaattaaaaatgctgatatatcaagaccgggcttagagatggcaggttatttttcacattatgcgtcagatagaatacaactattaggaacaacagaactatcgttttacaatttattaccagataaggatcgtgcaggtcgtatgcgtaaactatgcagaccagaaacgcctgcaattattgtgacacgtggattgcagccaccagaagaattagttgaagctgcaaaagaattaaatacgccacttatagttgctaaagatgcgactacaagtttaatgagtcgcttaacaacgtttttagagcatgcacttgcaaagacgacatctttacatggtgttttagtagatgtttacggtgttggtgtactaattaccggtgattcaggaataggtaaaagtgagactgcgttggagttagttaaacgtgggcatagattagtagcagatgataatgtagaaatacgtcaaattaataaagatgaactaatagggaaaccaccaaagttaatagaacatctattagaaatacgtggactaggtattatcaatgttatgactttatttggcgcgggttcaatattaactgaaaaacgaattagattaaatattaatttggaaaactggaacaagcaaaagttatatgaccgcgtcggtcttaatgaagagacgttaagtattttagatactgaaatcactaaaaaaacaatacctgtaagacctggtagaaatgttgcggtaattattgaggtcgctgcaatgaactatcgattaaatatcatgggcattaacactgccgaagaatttagtgaaagattaaatgaagaaattatcaagaacagtcataagagtgaggagtaggttgaatgggtattgtatttaactatatagatcctgtggcatttaacttaggaccactgagtgtacgatggtatggaattatcattgctgtcggaatactacttggttactttgttgcacaacgtgcactagttaaagcaggattacataaagatactttagtagatattattttttatagtgcactatttggatttatcgcggcacgaatctatttcgtgattttccaatggccatattacgcggaaaatccaggtgaaattattaaaatatggcatggtggtatagcaatacatggtggtttaataggtggctttattgctggtgttattgtatgtaaagtgaaaaatttaaacccatttcaaattggtgatatcgttgcgccaagtataattttagcgcaaggaattggacgctggggtaactttatgaatcacgaggcacatggtggacctgtgtcacgcgcttttttagaacaattacatttgcctaattttataatagaaaatatgtatattaacggccaatattatcatccaacattcttatatgaatccatttgggatgtcgctggatttattatcttagttaatattcgtaaacatttaaaattaggagaaacattctttttatatttaacttggtattcaattggtcgattctttatagaaggattacgtacagatagcttaatgctcacaagtaatattagagttgcacaattagtatcaattcttttaattttaataagtataagtttaattgtatatagaaggattaagtataatccaccgttgtatagcaaagttggggcgcttccatggccaacaaaaaaagtgaagtagtgatattttgagaaaatttttatcaaaaacatatcatcatacaaaccctttatggcatgtataccgtcttgttaaattttcgaaagtttttaagaatgtaatcatcattgaattttcgaaatttattccaagtatggtactgaaaagacatatatataaacaacttttaaatattaatatcggtaatcaatcatcgatagcttataaagtaatgttagatattttttacccagaactgattacgattggtagtaacagtgttattggttacaatgtaacaattttgacgcatgaagcattagttgatgaatttcgttatggaccagtgacgataggatctaacactttgattggtgcaaatgctaccattttacccggtataacgattggtgacaatgtaaaagttgcagctggtacggttgtttcaaaagatataccggataatggatttgcatatggcaaccctatgtatataaaaatgattaggaggtgacaattttatggcgcaaaagaataataatgtaattccaatgacttttgatgatgcattttatcgtaaaatggctaatcagaagtttaaacaaagagaatataaacgagctgctgaatactttgaaaaagtgttagaattgtcacctgatgatctggaaattcaaattgattatgcacaatgtctagtacaactaggtattgctaaaaaagcagaacatttattttatgacaatattatttataataggcatctagaagatagcttttatgaattgagtcagctcaacattgaagttaacgaaccaaacaaggcattcttgtttggtattaattatgttattgttagcgacgaccaagattatagagatgaactagatcaaatgtttgatgtgaaatatcaaagtgaagaacaaattgaacttgaagctcaattgtttgtagttcaaatactattccaatatcttttttctcaaggtcgattaaaagatgcaaagaattatgtcttacatcaaccacaagaagttcaagagcatcgtgtggtacgtaatttattggcaatgcgttatttatatctcggcgaatatgatactgctaaagcattgtacgaagcactattacaagaggatagtacagatatatatgcattatgccattatactttgctactttataacactaaggaaaatgaacaataccaaaagtatttaaaaatattaaataaagttgtacctatgaatgacgatgaaagttttaaattaggtattgttttaagttatttaaagcagtatcgtgcatcacaacaattgttgtatcctttatataaaaaagggaaatttttatcaattcaaatgtacaatgctttagcatataattattattatttaggtgaagaagacgaaagtcattactactgggataaattgaagcaaatttctaaagtggaaattggacatgctccttgggtaattgaaaatagcaaagaagtttttgaccaacatattttgccattacttcaaagtgatgacagtcattatcgtttatatggtatttttttattggatcaattaaatggcaaagaaattgtgatgacggaaagtatttggcaggttctggaaaatctaaataattatgagaaattgtatttaacgtatttagttcaaggtttaacgctcaataaattagacttcattcatcgcggcttgttaacgctttaccataatgaattatttgtaagtgaaaatgatttaatggttgcatggattaatcaaggtgaactcataattgctgaaaaagtagatttaactgatgttgagccatatatcggtgcgtttatttatttgtattttaaaaatcaacctcgaaacgttacaaagaaccaaattacaacatggttaggcataacacaatataaactgaacaaaatgattgaatttctcttgagcatatagatttatgaaaagttagatttattatataatgagcataatgattaataatgaggaggcgttaataaaatgactgaaatagattttgatatagcaattatcggtgcaggtccagctggtatgactgctgcagtatacgcatcacgtgctaatttaaaaacagttatgattgaaagaggtattccaggcggtcaaatggctaatacagaagaagtagagaacttccctggtttcgaaatgattacaggtccagatttatctacaaaaatgtttgaacacgctaaaaagtttggtgcagtttatcaatatggagatattaaatctgtagaagataaaggcgaatataaagtgattaactttggtaacaaagaattaacagctaaagcggtcattattgctacaggtgcagaatacaagaaaattggtgttccgggtgaacaagaacttggtggacgcggtgtaagttattgtgcagtatgtgatggtgcattctttaaaaataaacgcctattcgttatcggtggtggtgactcagcagtagaagagggaacattcttaactaaatttgctgacaaagtaacaatcgttcaccgtcgtgatgagttacgtgcacagcgtattttacaagatagagcattcaaaaatgataaaatcgactttatttggagtcatactttgaaatcaattaatgaaaaagacggcaaagtgggttctgtgacattaacgtctacaaaagatggttcagaagaaacacacgaggctgatggtgtattcatctatattggtatgaaaccattaacagcgccatttaaagacttaggtattacaaatgatgttggttatattgtgacaaaagatgatatgacaacatcagtaccaggtatttttgcagcaggagatgttcgcgacaaaggtttacgccaaattgtcactgctactggtgatggtagtattgcagcgcaaagtgcagcggaatatattgaacatttaaacgatcaagcttaattcgaagtcgaattaagatgttgagttgtaaattatttggatatttattttaatagtgtcatcacattgttaaaataatgtctttcttttaaattaaaacaaattatatagaaaactagaacttagcacgtatcatttgtgcgtttcaatgagttctagtttttttatatgttatattaaacttataactttatgggagtgggacagaaatgataaagagccactaatgatttattatgtagtggttcttacacattagccacagctaatgtgtacttaaaaataggaatacatgagtaaaactcatgcataagaaatactaatttctatagaaaaagtatttctttatcgttgtcccgccctaacttgcacattatcgtaagctgacttttcgtcagcttctgtgttggggccccgccaacttgcattgcctgtagaaattgggaatccaatttctctttgttggggcccacaccccaacccgcattgcctgtagaatttcttttcgaaattctctgtgttggggcccacaccccaactcgcattgcctgtagaatttcttttcgaaattctctgtgttggggcccacaccccaactcgcattgcctgtagaatttcttttcgaaattctctgtgttggggcccacaccccaactcgcattgcctgtagaatttcttttcgaaattctctgtgttggggcccacaccccaactcgcattgcctgtagaatttcttttcgaaattctctgtgttggggcccctgactagagttgaaaaaaagcttgttgcaagcgcattttcattcagtcaactactagcaatataatattatagaccttaggacattgatttatgtcccaagctccttttaaatgatgtatatttttagaaatttaatctagacatagttaaaaataaatataaaaacatcgttgcttaattttgtcatagaacattaaaattaacatcatgaaattcgttttggcggtgaaaaaataatggataataatgaaaaagaaaaaagtaaaagtgaactattagttgtcacaggtttatctggtgcaggtaaatctttggttattcaatgtttagaagacatgggatatttttgtgtagataatctaccaccagtgttattgcctaaatttgtagagttgatggaacaaggaaatccatccttaagaaaagtggcaattgcaattgatttaagaggtaaggaactatttaattcattagttgcagtagtggataaagtcaaaagtgaaagtgacgtcatcattgatgttatgtttttagaagctagtactgaaaaattaatttcaagatataaggaaacgcgtcgtgcacatcctttgatggaacaaggtaaaagatcgttaatcaatgcaattaatgatgagcgagagcatttgtctcaaattagaagtatagctaattttgttatagatactacaaagttatcacctaaagaattaaaagaacgcattcgtcgatactatgaagatgaagagtttgaaacttttacaattaatgtcacaagtttcggttttaaacatgggattcagatggatgcagatttagtatttgatgtacgatttttaccaaatccatattatgtagtagatttaagacctttaacaggattagataaagacgtttataattatgttatgaaatggaaagagacagagattttctttgaaaaattaactgatttgttagattttatgatacccgggtataaaaaagaagggaaatctcaattagtaattgccatcggttgtacgggtggacaacatagatctgtagcattagcagaaagactaggtaattatctaaatgaagtatttgaatataatgtttatgtgcatcatagggacgcacatattgaaagtggcgagaaaaaatgagacaaataaaagttgtacttatcggtggtggcactggcttatcagtcatggctaggggattaagagaattcccaattgatattacagcgattgtaacagttgctgataatggtgggagtacagggaaaatcagagatgaaatggatataccagcaccaggagacatcagaaatgtgattgcagctttaagtgattctgagtcagttttaagccaactttttcagtatcgttttgaagaaaatcaaattagcggtcactcgttaggtaatttattaatcgcaggtatgactaatattacgaatgatttcggacatgccattaaagcattaagtaaaattttaaatattaaaggtagagtcattccatctacaaatacaagtgtgcaattaaatgctgttatggaagatggagaaattgtttttggagaaacaaatattcccaaaaaacataaaaaaattgatcgtgtgtttttagaacctaacgatgtgcaaccaatggaagaagcaatcgatgctttaagggaagcagatttaatcgttcttggaccagggtcattatatacgagcgttatttctaacttatgtgtcaatggtatttcagatgcgttaattcattctgatgcgcctaagctatatgtatctaatgtgatgacgcaacctggggaaacagatggttatagcgtgaaagatcatatcgacgcgattcatagacaagctggtcaaccgtttattgattatgtcatttgtagtacacaaactttcaatgctcaagttttgaaaaaatatgaagaaaaacattctaaaccagttgaagttaataaggctgaacttgaaaaagaaagcataaatgtaaaaacatcttcaaatttagttgaaatttctgaaaatcatttagtaaggcataatactaaagtgttatcgacaatgatttatgacatagctttagaattaattagtactattcctttcgtaccaagtgataaacgtaaataatatagaacgtaatcatattatgatatgataatagagctgtgtaaaaaaatgaaaatagacagtggttctaaggtgaatcatgttttaaataagaaaggaatgactgtacgatgagctttgcatcagaaatgaaaaatgaattaactagaatagacgtcgatgaaatgaatgcaaaagcagagctcagtgcactgattcgaatgaatggtgcacttagtctttcaaatcaacaatttgttataaatgttcaaacggaaaatgcaacaacggcaagacgtatttattcgttgattaaacgtgtctttaatgtggaagttgaaatattagtccgtaaaaaaatgaaacttaaaaaaaataatatttatatttgtcgtacaaagatgaaagcgaaagaaattcttgatgaattaggaattttaaaagacggcatttttacgcatgaaattgatcattcaatgattcaagatgacgaaatgagacgcagttacttgagaggagcttttctggcaggtggctcagtgaataaccccgaaacatcttcgtaccatttggaaattttttctcaaaatgagagtcatgcagaaggcttaacgaaactaatgaatagttatgagttgaatgccaaacatttagagcgaaaaaaaggaagtattacgtatttaaaagaagcggaaaagatttcggattttcttagtttgataggtggctatcaagcgttattaaaatttgaagacgtacgtattgtaagagatatgcgtaattctgttaaccgactcgttaattgtgaaacggcaaatctaaataaaacagttagtgctgcgatgaaacaagttgagagcattaaattgattgataaagaaattggtattgaaaatttaccagacaggttgagagagattgctagaattcgagtagaacatcaagaaatttcgttgaaagagcttggagaaatggtgtcaactggtccaatttcaaaatcaggtgtaaatcatcgattaagaaaacttaatgatttagccgataagattagaaatggtgaacaaatagaattataagtaagaaggtgtttttggtagtaaattatcaaaaacaccttttttatgagtaaaaagtgtttaatgaataatagtcgactaactattaaattgatctggaaagtttaatgaaggaaattcaataaccaagcgttacccaattttctcattaagtagcatcatatatatcaatttggtcataagaaaatatgaatgtgataattaattgagtccctgaaagtccctgatcatagacaaaacaaaatcaacataataagaatcccgacattgcgggattctctgtattgaaaagtattgtattttattaaaacagcctccttgaagggaattgaacccctatcttaagaaccggaatcttacgtgttatccattacaccacaaggagcaagtatgtaatcatatcactgtactatcagaagtaaaataagtacaatctaaaatagatattatcagtttacaaaggaaagagacaagcgtcaaacaatgtaactatttagagtcaaagtttttgaccaaatttgacttaatatgtaaaataatgagtaacagttattacaaggaggaaatatagatgaatttaattcctacagttattgaaacaacaaatcgcggtgaacgtgcatacgatatatactcacgtttattaaaagaccgtattattatgttaggttcacaaattgatgacaacgtagcaaattcaatcgtatcacagttattattcttacaagcacaagactcagagaaagatatttatttatacattaattcaccaggtggaagtgtaacagctggttttgcgatttatgatacaattcaacacattaaacctgatgttcaaacaatttgtatcggtatggctgcatcaatgggatcattcttattagcagctggtgcaaaaggtaaacgtttcgcgttaccaaatgcagaagtaatgattcaccaaccattaggtggtgctcaaggacaagcaactgaaatcgaaattgctgcaaatcacattttaaaaacacgtgaaaaattaaaccgcattttatcagagcgtactggtcaaagtattgaaaaaatacaaaaagacacagatcgtgataacttcttaactgcagaagaagctaaagaatatggcttaattgatgaagtgatggtacctgaaacaaaataattcaaagtaaagagtagactaagcagtctgctctttttgtatgattaaaccaatgtatcaataaattgttcgaaatattttgagttaaagcaaaaaataacgggtaaaaatatttgtgaggatttaattagacacgttgcgtctgcggttctacaatctaacaaatataaaggatgattttatgaaaggcattgaattacttaacaatccatttttaaacaaaggtacagcttttactaacgaagaaagaaaacagttagggcttgaaggtttattacctgcgaatgttcgaactttagaacaacaagcagaacaatgttatgaacaattcaaggcgaaacaaaccgattttgagaaacgtttatttttaatggcaatttttaatcgtaatcgtacattgttttacaaattgacttcagagcatttagttgaatttatgccaattatttatgaccctgttattgcacaatcgattgaacaatataatgagaatttcagcagaccccaagatgcagtatttttatctgttgatagacaagaccaaattgaacaagaattgcgcaacgttgcaaatggcagagatattcgattaatcgtagtgacagatgcggaaggtatattaggtatcggcgattggggcgttgatggtgtagatattgcaataggaaaattaatagtatatacagcggcagctggaataaatccttcacaagtattacctgtatctttagatgtaggtactaataatgaacaattactaaaggatgacctttatttaggaaatcgtcataaacgtgtcgatgatgagacatattacgcatttgtagataaatttgtaagtgcagtacgtaaagaatatcctaatgcactattacattgggaagattttggtagagggcatgccaaaaatattttagataaatatgaagatacgttgccaacttttaatgatgatattcaaggtacaggtatagttacattagctggcgtactaggtgcattaaatatttctaaagtagattatacgaatcagacgtttttagtttatggtggtggtacagctggtatgggtattaccaatattttaaaagatgaactaattaaacagggtgtttcagaagaaaaagcaaatcagcatttctatattatggataaacaaggattgttgtttgatgatatggatgatttaacagaagcgcaacaagtatttgctaaaaataggaatgaattttcaaatacagtaaactggaaaaatttaaaagaagtaattgaaaatattaagcctactgttttaatcggtacatcaactcaaacaggtgcatttacagaagatgcagtaaaagagatgttaaaacatacagaacgtccaatgattttcccattgtctaatcctacaaaattagcagaagcaactgcacaagatttattaaaatggactaacggaaaagcattaattggaactggtatcccatataatgacattgaatacaatggtgtgaattacagtattggtcaagcaaataatgcattgatgtatcctggtttaggtttgggccttattgcgtcaaaagcgaagaaagtaaatcaacagattctatcagctgcgagtcatgcacttggtggcatggtcaatccagatgaaccaggtgctgcagtcttaccacctgtcgagaaaatacatcaatgttctcgtgccatagctaaagcggttgcacaaagtgtcattgatcaaggattaaacgctgaaactattgatgatattgacaaagcaattgaagctgaaatttggtatcctgaatacaaatcatacatttaattttataaagtagtaaaaggtcgtttgaacattttgtttcaagtggccttttcgtatttactttataattaatcaaccaatattcataagtgactttaaagttatatctatatgtaatatcagcaaatagataagtctagagagatttaacgaattatctcctagactttttgcttgaagtggagtaggagagatcaatgtcccactcacttactaattaaatcttcaagtgccatttttaaattactatatttaaattggaatcccaatgcttgaattttattaggtaatactttttgagtatccaatactactgttgacatttgaccaagtatgagacgcattgcaagacttggtgcccaagtttcatgaggcttatgcatagctcttgctaaagtgtagccaaataaattttgacgctcaggtataggtgcagttaaattaaacggaccactagctgactcgttatttattaaaaataaaatagcttgaattaaatcattgatatgaatccatgaataccattgttgaccagaacctaatttaccaccaatgtaatattcgtatggtagtttcattgtttgtaacgcaccgccttcattcgataaaattataccgaaacgaccgatgacaactcgtgtacctaattgttcaaattgttgtgcgaaacgttcccattgatacacaatatctgataagaaatcaaacggtaaagttttataaacttctgtgtaactcataaataaatcaggaggatagtaaccagtggcactagcattaaataaaactttaggtgctttattacgtgatttaaacaattcatataaagcttgcgtagattgaattctacttagcattagcgtttgtttatattccggtgtccatcgtttattcaatgtagcacctgctaagttgatgaccacatcgatattttgaggaactttgtgttcccacccagatttagcccagttgacatatgaaattttcttatcatttgaaatttggtcgtgtcgcgttaatatcgtaatatgtgaatctgattttttgatttcattaactaattgagatccaaccataccagtcccaccagtaattaagtattgtttcattatcattcaccccatgtaattttgtatttagttactatttaataatcattattgttgttcaaaggttatacattatttagacaataatatgtcaataactttttttgaattgtattttaataaaaatgatataagttataataaaggtgtaccttcgataacgaataaacatctcttaaaagtatgtgtaaaacgctgcatgatacaaacgaaggtaaaaatttgactccctttagtagtggacccgtacgtttatcgtgcgggtcgtttttatttatttcttattcccattatagatcaattcaaagcattaattttttaaacaaatttaagaatacatagtaatataacaatctaaacataaaaacttttaacacaacacttaaactaatgctttaattttcaatacgtagctataatttgttgtaaaatcaaaaaggttgaaatgttaattttcaaaaaaaggctcaaaatatgtttgatttagttattaaatgttaagatatataagactactatttctttgtaaaaatgaatccgatttacgagtgagtaatagtgaatacagttttaagttgaagaaggcaaaaagagtaaatgtttattgatatttgtagaaactaggtaagcaaattagttgtgaaaatgttaatggttgcgtgataatttctatatttaaattagtttgaagtgagggagagtatgtcgaatcaaaattacgactacaataaaaatgaagatggaagtaagaagaaaatgagtacaacagcgaaagtagttagcattgcgacggtattgctattactcggaggattagtatttgcaatttttgcatatgtagatcattcgaataaagctaaagaacgtatgttgaacgaacaaaagcaggaacaaaaagaaaagcgtcaaaaagaaaatgcagaaaaagagagaaagaaaaagcaacaagaggaaaaagagcagaatgagctagattcacaagcaaaccaatatcagcagttgccacagcagaatcaatatcaatatgtgccacctcagcaacaagcacctacaaagcaacgtcctgctaaagaagagaatgatgataaagcatcgaaggatgagtcgaaagataaggatgacaaagcatctcaagataaatcagatgataatcagaagaaaactgatgataataaacaaccagctcagcctaaaccacagccgcaacaaccaacaccaaagccaaataataatcaacaaaacaatcaatcaaatcaacaagcaaaaccacaagcaccacaacaaaatagccaatcaacaacaaataaacaaaataatgctaatgataagtagtatttagtcaaacaaaaatgaaccagtatgacagacaacacaattaattaggttgtctcgaatattggttcttatttttataattgttaattaggggagagatgatacttaaatagttagttgtttgttttgcggatagtgaaatttattttgagtgaggtgggacagaaatgatattttcgcaaaatttatttcgtcgtccaaccccaactcccattgcctgtagaaattgggaggagccaatttctctatgttggggccccgccaacttgcattgtctgtagaaattgggaatccaatttctctatgttggggcccatccccaacttccattgtctgtacaaattgggaatccaatttcactatgttggggcccctgactttaattggaaaagcttgttacaagcgaaattttgttcagtcaattactactaatgtaaattttcgggttctagagcattgatttatgtcctagtctcaaataataagcaaatgattagcgagttgttataagggtatacatttgactacagcgaataaaataaaacgttttgttgtataacaaatcgaaaatatattgcaagcgctttatcaaattatttagaaaatttaagttttatgcttgcaatttttgaaatagaatagtactattgcaagtgtaaagaggttaatttttgtcccacgcgggacttgaaaaggcaaccactggttgtgatatatccttatttacatttataaatataaggaggaggtagtagtgaaagacttattgcaagcacagcaaaagcttataccggatctcatagataaaatgtataaacgtttttctattcttactactatctcaaaaaatcagcctgtcggacgtcgaagtttaagcgaacatatggatatgactgaacgtgtactgcgttctgaaacagatatgcttaagaaacaagatttgataaaagttaagcctaccggtatggaaattacagctgaaggtgagcaactgatttcgcaattgaaaggttactttgatatctatgcagatgacaatcgtctgtcagaaggtattaagaataaatttcaaattaaggaagttcatgttgttcctggtgatgctgataatagccaatctgttaaaacagaattaggtagacaagcaggtcaattacttgaaggcatattacaagaagatgcgatagttgctgtaactggcggatccacgatggcatgtgttagtgaagcaattcatttattaccatataatgtattcttcgtaccagccagaggtggactaggcgaaaatgttgtctttcaggcaaacacaattgcagctagtatggcacaacaagctggcggttattatacgacgatgtatgtacctgataatgtcagcgaaacaacatataacacattgttgttagagccatcagtcataaacactttagacaaaattaaacaagcaaacgttatattacacggcattggtgatgcgctgaagatggcgcatcgacgtcaatcacctgaaaaggtcattgaacaacttcaacatcatcaagctgtcggagaggcatttggttattattttgatacacaaggtcaaattgtccataaggttaaaacaattggacttcaattagaagaccttgaatcaaaagactttatttttgcagttgcaggaggcaaatcgaaaggtgaagcaattaaagcatacttgacgattgcacccaagaatacagtgttaatcactgatgaagccgcagcaaagataatacttgaataagagataaaaagtttaatactttttaaatatcattttaaaggaggccattataatggcagtaaaagtagcaattaatggttttggtagaattggtcgtttagcattcagaagaattcaagaagtagaaggtcttgaagttgtagcagtaaacgacttaacagatgacgacatgttagcgcatttattaaaatatgacactatgcaaggtcgtttcacaggtgaagtagaggtagttgatggtggtttccgcgtaaatggtaaagaagttaaatcattcagtgaaccagatgcaagcaaattaccttggaaagacttaaatatcgatgtagtattagaatgtactggtttctacactgataaagataaagcacaagctcatattgaagcaggcgctaaaaaagtattaatctcagcaccagctactggtgacttaaaaacaatcgtattcaacactaaccaccaagagttagacggttctgaaacagttgtttcaggtgcttcatgtactacaaactcattagcaccagttgctaaagttttaaacgatgactttggtttagttgaaggtttaatgactacaattcacgcttatacaggtgatcaaaatacacaagacgcacctcacagaaaaggtgacaaacgtcgtgctcgtgcagcagcagaaaacatcatccctaactcaacaggtgctgctaaagctatcggtaaagttattcctgaaatcgatggtaaattagatggtggtgcacaacgtgttcctgtagctacaggttcattaactgaattaacagtagtattagaaaaacaagacgtaacagttgaacaagttaacgaagctatgaaaaatgcttcaaacgaatcattcggttacactgaagacgaaatcgtttcttcagacgttgtaggtatgacttacggttcattatttgacgctacacaaactcgtgtaatgtcagttggcgaccgtcaattagttaaagttgcagcttggtatgataacgaaatgtcatatactgcacaattagttcgtacattagcatacttagctgaactttctaaataattttagtatagtttttattcaaatacgctagtgctcagaactatttagcattaattaaagcttatgagtaagcggggagcacaaacgcttctccgcttatttttatataaaatttcctaattacaaggaggaaacaccatggctaaaaaaattgtttctgatttagatcttaaaggtaaaacagtcctagtacgtgctgattttaacgtacctttaaaagacggtgaaattactaatgacaaccgtatcgttcaagctttacctacaattcaatacatcatcgaacaaggtggtaaaatcgtactattttcacatttaggtaaagtaaaagaagaaagtgataaagcaaaattaactttacgtccagttgctgaagacttatctaagaaattagataaagaagttgttttcgtaccagaaacacgtggcgaaaaacttgaagcagctattaaagaccttaaagaaggagacgtattattagttgaaaatacacgttatgaagatttagacggtaaaaaagaatctaaaaatgatccagaattaggtaaatactgggcatctttaggtgatgtgtttgtaaatgatgcttttggtactgcgcatcgtgagcatgcatctaatgttggtatttctacacacttagaaactgcagctggattcttaatggataaagaaattaagtttattggtggcgtagttaacgatccacataaaccagttgttgctattttaggtggagcaaaagtatctgacaaaattaatgtcatcaaaaacttagttaacattgccgataaaattatcatcggcggaggtatggcttatactttcttaaaagcgcaaggtaaagaaattggtatttcattattagaagaagataaaatcgacttcgcaaaagatttattagaaaaacatggtgataaaattgtattaccagtagacactaaagttgctaaagaattttctaatgatgccaaaattactgtagtaccatctgattcaattccagcagaccaagaaggtatggatattggaccaaacactgtaaaattatttgcagatgaattagaaggtgcgcacactgttgtatggaatggacctatgggtgtattcgagttcagtaactttgcacaaggtacaattggtgtatgtaaagcaattgcaaaccttaaagatgcaattacgattatcggtggcggtgattcagctgcagcagcaatttctttaggttttgaaaatgacttcactcatatttcaactggtggcggagcgtcattagagtacttagaaggtaaagaattgcctggtatcaaagcaatcaataataaataataaagtgatagtttaaagtgatgtggcatgtttgtttaacattgttacgggaaaacagtcacaagatgacatcgtgtttcatcacttttcaaaaatatttacaaaacaaggagtgtctttaatgagaacaccaattatagctggtaactggaaaatgaacaaaacagtacaagaagcaaaagacttcgtcaatgcattgccaacattaccagattcaaaagaagtagaatcagtaatttgtgcaccagcaattcaattagatgcattaactactgcagttaaagaaggaaaagcacaaggtttagaaatcggtgctcaaaatacgtatttcgaagataatggtgcgttcacaggtgaaacgtctccagttgcattagcagatttaggcgttaaatacgttgttatcggtcattctgaacgtcgtgaattattccacgaaacagatgaagaaattaacaaaaaagcgcatgctattttcaaacatggaatgactccaattatttgtgttggtgaaacagacgaagagcgtgaaagtggtaaagctaacgatgttgtaggtgagcaagttaagaaagctgttgcaggtttatctgaagatcaacttaaatcagttgtaattgcttatgaaccaatttgggcaatcggaactggtaaatcatcaacatctgaagatgcgaatgaaatgtgtgcatttgtacgtcaaactattgctgacttatcaagcaaagaagtatcagaagcaactcgtattcaatatggtggtagtgttaaacctaacaacattaaagaatacatggcacaaactgatattgatggggcattagtaggtggcgcatcacttaaagttgaagatttcgtacaattgttagaaggtgcaaaataatcatggctaagaaaccaactgcgttaattattttagatggttttgcgaaccgcgaaagcgaacatggtaatgcggtaaaattagcaaacaagcctaattttgatcgttattacaacaaatatccaacgactcaaatcgaagcgagtggcttagatgttggactacctgaaggacaaatgggtaactcagaagttggtcatatgaatatcggtgcaggacgtatcgtttatcaaagtttaactcgaatcaataaatcaattgaagacggtgatttctttgaaaatgatgttttaaataatgcaattgcacacgtgaattcacatgattcagcgttacacatctttggtttattgtctgacggtggtgtacacagtcattacaaacatttatttgctttgttagaacttgctaaaaaacaaggtgttgaaaaagtatacgtacacgcatttttagatggtcgtgacgtagatcaaaaatccgctttgaaatacatcgaagagactgaagctaaattcaatgaattaggtattggtcaatttgcatctgtgtctggccgttattatgcaatggaccgtgacaaacgttgggaacgtgaagaaaaagcttacaatgctattcgtaactttgatgccccaacttatgcaactgctaaagaaggtgtggaagcaagttataatgaaggcttaactgacgaattcgtagtaccattcatcgttgagaatcaaaatgacggtgttaatgatggagatgcagtgatcttctataatttccgacctgatagagcagcacaattatcggaaatttttgcgaacagagcattcgaaggctttaaagttgaacaagttaaagatttattctatgcaacattcactaagtataatgacaatatcgatgcggctatcgttttcgaaaaagtcgatttaaataacacaattggtgaaattgcacaaaataacaatttaactcaattacgtattgcagaaactgaaaaatatcctcacgttacttactttatgagtggtggacgtaatgaggaatttaaaggtgaacgccgtcgtttaattgattcacctaaagttgcaacgtatgacttgaaaccagaaatgagtgcttatgaagttaaagatgcattattagaagagttaaataaaggtgacttggacttaattattttaaactttgctaaccctgatatggttggacatagtggtatgcttgagccgactatcaaagcaatcgaagcggttgatgaatgtttaggtgaagtcgttgataaaattttagacatggacggttatgcaattattactgctgaccatggtaactctgatcaagtattgacggatgatgatcaaccaatgactacgcatacaacgaacccagtaccagtgattgtaacaaaagaaggcgttacacttagagaaactggtcgcttaggtgacttagcacctacattattagatttattaaatgtagaacaacctgaagacatgacaggtgaatctttaattaaacactaatattgtaaaagatgttaagtaaacgcttaatgacacttattttttgaaaataatagtaatatcattttgttaaatgaaagaataaagctataataattatagaataactatttaaaggagattataaacatgccaattattacagatgtttacgctcgcgaagtcttagactctcgtggtaacccaactgttgaagtagaagtattaactgaaagtggcgcatttggtcgtgcattagtaccatcaggtgcttcaactggtgaacacgaagctgttgaattacgtgatggagacaaatcacgttatttaggtaaaggtgttactaaagcagttgaaaacgttaatgaaatcatcgcaccagaaattattgaaggtgaattttcagtattagatcaagtatctattgataaaatgatgatcgcattagacggtactccaaacaaaggtaaattaggtgcaaatgctattttaggtgtatctatcgcagtagcacgtgcagcagctgacttattaggtcaaccactttacaaatatttaggtggatttaatggtaagcagttaccagtaccaatgatgaacatcgttaatggtggttctcactcagatgctccaattgcattccaagaattcatgattttacctgtaggtgctacaacgttcaaagaatcattacgttggggtactgaaattttccacaacttaaaatcaattttaagcaaacgtggtttagaaactgcagtaggtgacgaaggtggtttcgctcctaaatttgaaggtactgaagatgctgttgaaacaattatccaagcaatcgaagcagctggttacaaaccaggtgaagaagtattcttaggatttgactgtgcatcatcagaattctatgaaaatggtgtatatgactacagtaagttcgaaggcgaacacggtgcaaaacgtacagctgcagaacaagttgactacttagaacaattagtagacaaatatcctatcattacaattgaagacggtatggacgaaaacgactgggatggttggaaacaacttacagaacgtatcggtgaccgtgtacaattagtaggtgacgatttattcgtaacaaacactgaaattttagcaaaaggtattgaaaacggaattggtaactcaatcttaattaaagttaaccaaatcggtacattaactgaaacatttgatgcaatcgaaatggctcaaaaagctggttacacagcagtagtttctcaccgttcaggtgaaacagaagatacaacaattgctgatatcgctgttgctacaaacgctggtcaaattaaaactggttcattatcacgtactgaccgtattgctaaatacaatcaattattacgtatcgaagatgaattatttgaaactgctaaatatgacggtatcaaatcattctataacttagataaataatcattttaaacattaagtactgccataattttagttgaggattattatgtcggtataaattgaataaagtttttgagttcacgcttaaaaagttcacgcttttatttataacctgccacagagttgagactgtggtaggttttttattttgaagtattattcgtaatagactaataatcaggaggtaactaataacacatatttaacttgtattcttaaactggtataataaatttatgttgaaatgaatattgtatgacagggtattcacttttattaaaaggtaaaaattaaataaaggttttatagaacgtatttaaatatatgaggagtaaacaaatggctgatagaacgaataaagaaattaaaacaggacgctttattgcaactgcatcaatcgtattctcaatattgttgattattcattactttgtttcgttggataatgcgactgccaaagcattactcaatttaacgaatcaaaacacttcagataaagcgatagattacattttaaacagctttagattcactggtattatgtatattttggcttatctagcaggcttcatcactttttggaatcgacatacttatgtgtggtggtttatgtttgcagtttatgtatcaaatagtttgtttacgttgattaatttatcaatcacaattcaagcaataaaagctgcacacggtgcgtacttaacattgccaattttaattgttattataggttcgattgcattagcgatttatatgcttgttgtttctatcaaacgtaaaagtacatttaatcgctagaaaattgattttaacaataaaaatatgatatactacttgtcgtatataaggaacggaggacaatttatgcatacatttttaatcgtattattaatcattgattgtattgcattaataactgttgtactactccaagaaggtaaaagcagtggactttcaggtgccatcagtggtggtgctgagcagttattcggtaaacaaaaacaacgtggcgtcgatttattcttaaatagattaacaattattttatcaatattattttttgtacttatgatttgcataagttatcttggtatgtaaggtccggcgatgtaaatgtcgggcttttttatttataattagaataataaaggactcatgttcaattattagaaacatattgtttaattaagtacgtttgttaattgtgaaaaaggagcgttagatttatgcaaataaagttaccaaagcctttcttttttgaggaaggtaaacgtgccgtgttattactacatggttttacaggcaattcgtctgatgttcgtcaattaggtcgatttttacaaaagaaaggttatacatcgtatgcaccgcaatatgaaggccatgcagcaccaccagaagagatacttcaatcaagtccttttgtttggtttaaagatgccttagatggctatgactaccttgttgaacaaggttatgatgaaatcgttgttgctggcttgtcattaggtggcgattttgcattaaaattaagcttaaatcgagatgtaaagggtattgtaacgatgtgtgctcctatgggtggcaaaactgaaggtgccatttatgaaggctttttagaatatgcacgcaattttaaaaagtatgagggtaaagatcaagaaacgattgataacgaaatgcatcatttcaaaccaactgaaactttaaaagaattaagtgaagcattagatacgattaaagatcaagttgatgaggtgtttgacccaattttagtgattcaagcagaaaacgacaatatgattgatccacaatccgcaaattatatatatgaacatgtagactctgacgaaaaagatatcaaatggtatagtcagtcaggacatgttattacaattgataaagaaaaagaacaagttttcgatgatatttatcaatttttagagtcattagactggtcagaataaaaagagattttaacattagaaaggaggggcataatgaatttaaagcaatcaatagaagagattattaatcaacctgaatatgaacctatgtcagtgtcagattttcaagatgcattaggtttaagcagtgccgactcgtttagagatttaattaaggtgcttgtggagttagaacaatcaggattaatcgaacgttcgaaaacagatagataccaaaaaaagcatagttccaaaggtcaatcgaaattaattaaaggaacattaagtcaaaacaaaaaaggttttgctttcctaagacctgaagacaaagatatggaagatatatttattcccccaacaaaaattaatcgtgccttggatggagatactgttattgtagaaatccatcaatcaaaaggtgagcataaaggtaaaattgaaggggaagttaagtcaattgagaagcattcagtaactcaagtggttggtacgtatagtcaggctagacattttggttttgtcattccagatgataaacgaattatgcaagatattttcattcctaaaggtcaaagcttaggtgcagtagatggacacaaagtattagttcaaattactaagtatgctgacggttcagataatccagaaggacatatttctgctattttaggacataaaaatgatcctggcgtagatattttatctattatctatcaacatggcatagaaattgaatttcctgatgaagtgttacaagaagctgaagcaacaccagacaatatagaagatagtgaaattaaaggacgtcatgatttacgtaatgaattgaccatcactattgatggcgcggatgctaaagacttagatgacgcaattagtgttaaaaagttagcgaacggtaatacacaattaactgtaagtattgctgatgtcagctattatgtaacagaaggttctgcattggataaagaggcttatgatagagctacaagtgtatatcttgttgaccgtgtaattccaatgattccacatcgattaagtaatggtatttgttcattgaatcctaatgttgatcgtttaactttaagctgtcgcatggaaatcgatgatagtggtcgcgttgtaaaacatgaaatctttgatagtgtgattcattctgattatcgaatgacgtatgatgcggtaaatcagattattactgaaaaggatcctacgattcgaaagcagtataatgaaattacgcctatgctagatttagcacaagatttatcaaatcgtttaattcaaatgagaaaacgccgtggtgaaattgatttcgatattagcgaagcgaaagtactagttaacgaagatggtatacctacagatgttcaattgaggcaacgtggtgaaggcgaacgtcttattgagtcatttatgttaattgcaaatgaaacagttgctgaacattttagtaagttagatgtaccatttatttaccgagtgcatgagcaacctaaatcagatcgcttaagacaattctttgattttattacaaactttggcatcatgattaagggtactggcgaagatattcatccaacaacacttcaaaaggttcaagaagaagtagaaggtcgacctgaacaaatggtcatttcaacaatgatgttacgttcaatgcaacaagcgcattatgatgatgtgaacttgggacattttggcttatcagctgaatattatacgcattttacatcaccaattagacgttatcctgatttaacagttcatcgtttaatccgtaagtatttaattgagaaatcaatggataacaaagaagtgaagcgttgggaagacaaattgcctgagttagctgaacatacttctaaacgtgaacgtcgtgctattgaggcagaacgtgacactgatgaattgaaaaaagcagaatatatgattcaacatattggtgatgaatttgaaggtattgtcagctcagtagctaacttcggtatgttcattgaattgccaaatacgatagaaggtatggttcatattgcgaatatgactgatgattattaccgttttgaagagcgtcaaatggcattaattggtgagcgtcaagctaaagtatttagaattggtgacacagttaaggtcaaagtgacgcatgttgatgtagatgaacgattaattgattttcaaattgtaggcatgcctttaccgaaaaatgatcgatcacagcgcccagcgcgaggtaagacaatacaagctaaaacgcgtggtaaatcattagataaatcgaaatctgatgataaaggtcataagaaaaaaggtaagcaacgtaaaggtaaaaatgaacgtaaaaatgacaaatcaggaaacagtaaatataagccattttataaagataaaagtgtgaaaaagaaagcacgtcgtaagaaaaaataagcagcaatgaggtgagtatgaatggctaagaagaaatcaccaggtacattagcggaaaatcgtaaagctagacatgattataatattgaagacacgattgaagcgggaattgtattgcaaggcacagaaataaaatcaattcgccgaggtagtgctaaccttaaagatagttatgcgcaagttaaaaacggtgaaatgtatttgaataatatgcatatagcaccatacgaagaagggaatcgttttaatcacgatcctcttcgttctcgaaaattattattgcataagcgtgaaatcattaaattgggtgatcaaacacgtgagattggttattcgattgtgccgttaaagctttatttgaagcatggacattgtaaagtattacttggtgttgcacgaggtaagaaaaaatatgataaacgtcaagctttgaaagaaaaagcagtcaaacgagatgttgcgcgcgatatgaaagcccgttattaagcgatttagttgcttaatcgggctatatttgatatagttatatgtgcttttgtaaattacaaaagtatgatttgtttgatttattatttcgggggcgtttctggattcgacaggggtcccccgagctcattaagcgtgtcggagggttgtcttcgtcatcaacacacacagtttataataactggcaaaacaaacaataatttcgcagtagctgcctaatcgcactctgcatcgcctaacagcatttcctatgtgctgttaacgcgattcaaccttaataggatatgctaaacactgccgtttgaagtctgtttagaagaaacttaatcaagctagcatcatgttggttgtttatcacttttcatgatgcgaaacctttcgataaactacacacgtagaaagatgtgtatcaggacctctggacgcgggttcaaatcccgccgtctccataaaaatatgcttggaaaccttgatttaatggggttttaatctagcaagtgtcaaatatgtgtcaagaaaataattttctgacacgttgaccttgctcttttttatgtattttatcttttcttgtgaggaaggttaaattagctgtgtacgttgatatgttagtatctgcttaggttcaaatttttatgaataaaaattaatagttgagtacatataagattttgcgttaaagattgaaagaatgtgtgtcaaataagtgtcaaaaaagttgagctttgagttttaatattgttcataaaaaaattctttatacaagataattctttatccaaaacaacaaaaaagagtaggcgagctactcttttttattatatttaacaattaaattagtatgtcattatgagtgtaagtaagctaatctataatgacaataataacaacaaagattataacgttgaatgcgagcattcataaatttatacttcatttaaagcactatcgtcatctttttgcttttctttttctttctctcgttcttgttcttttttgtactcttcttcaaattctttttctttcttttctacttcttctcttgtttccgctctatgagaaaaatcttcggttttaagtttactatatttgaatgatttagaatcaactgttttatcttctgagtatttatggacatttaaattaatatttccatcacctcttaactcatagataaacatggcttgtgcagttttgccttttttaatttgatcttggttatgttctgtccaagctttatattttttatcacttaatagataaccatctcttaatttatttactgtatttttatcatcttgagtgatattaatatagtcatgagaaatagaagatggatttaaatctttatcgtcttttttagcagtaatttccattttaaaagcgatatatttctttttctcatctttttcattgatgataaacggttcttttattttagcttcaaatttgtcactaacaatagtatcgcctttaatttttatatccatattttttttgcttttaaattctttaagttcttcatttaattcttcattgtcactttctttctttttgtgactagtgctctctttttttgcactatcttgatgatgtccacaagcacctaaaataagtgtacttgctaataatatccccattacttttttcatttaacatgtctcctttatttcgcaaaaatttattttaaaaactctaaacgacttatcgttttgagtaattaaacaaagttgatattttgtgagattctaagatgatattaaataattcttgtaataatgattctatgtattgttgcaataaattaatggaactataattactaatattatattacttttattgatagaaatatattacttttttaaaaaacttgtaatatatcgaaagatttaaatgtaaaattttgatttgttaagaaattgcgtttataaaaataaaaaaatcaacttatttgtatgagatgaatatgtattgaagaagatgtgttattaaattggaaaatacaggtcaaagatgggaactctcaaaagcgttattgtattttttagtcaatgcaaatagatttccataataataaacgtacttgatggttaaaaaattacttaaggctatatagcaaaactttttatatgagcagtcgaatataacgtttaaaatgattctttttggatataaacgattaagtaaaatgatttttcagtttgaaattaatcatataaatatcttaagggaaggttgatatcttaatgattaatattatttcagctttagggtctattggaacatttattatggctttattttattttgtatcagtttcagttcaactttatcaaatgaaaattagctttctgccagctttaggttttaaccaaattttattagaaagggagggggatcaacttaatataatgaattcggcaacagatgagcatcatcataaagattatattaaactatataatttaggtggcggtgctgctaaaaaaattgcaatagaggttttattgggtaatgataaagtcattcagaaaaaatacgtgaatattttacctagtaaagaaggatacatgttaccaattaataaaaatgtgtacgaagaattagaaagaacgattgagaataatggttatgaagctgatttgaatgtacgtatgacttattatcataatgtaagtcgcaaacaacaggaagttatattaaaaggtcaaatcgaccgttttaatacttataataataaagaaatttatgatttgcagtttatctaaaaattgatttaagagggtagttgtttattgcgaaaaatatcattcaattttaatgaaataatggcgtcattactataaaatattactttatgttgtaatgcatttttctataagatagaactaaaaggaggggcaaagatgcaaattagacaaatacatcaacatgactttgctcaagttgaccagttaattagaacggcatttgaaaatagtgaacatggttatggtaatgaatcagaactagtagaccaaattcgtctaagtgatacgtatgacaataacttagaattagtagctgttcttcaaaatgaagttgtagggcacggtttactaagtgaagtttatcttgataacgagacacaacgggaaattggattagtgttagcacctgtatcagttgatattcatcatcaaaataaaggtattgggaagcgattgattcaagcattagaacgagaagcaatattaaaaggatataattttatcagtgtattaggatggccgacgtattatggcaatctaggatatcaacgcgcaagtatgtacgacatttatccaccatatgatggtataccagatgaagcgtttttaattaaagaattaaaagtgaacagtttagcgggaaaaacaggtaccataaattacacatctgcttttgaaaaaatatgatttcaagctaggattacattaggcagagttcatattaataatacaaattgtttacaatgaaatcgtgtgttgtcgtttgcattttttaaaatagcaataaataaaatgtttgttagtaaagtattattgtggataataaaatgtcgatacaaattaattgctataatgcaattttagtgtataattgcattaatggagattaaatatatctttaaagggtatatagttaatataaaatgactttttaaaaagagggaataaaatgaatatgaagaaaaaagaaaaacacgcaattcggaaaaaatcgattggcgtggcttcagtgcttgtaggtacgttaatcggttttggactactcagcagtaaagaagcagatgcaagtgaaaacagtgttacgcaatccgatagcgcaagtaacgaaagcaaaagtagtgattcaagtagcgttaatgctgcacctaaaacagacaacacaaacgtgagtgatactaaaacaacgtcaaacactaataatggcgaaacgagtgtggcgcaaaatccagcacaacaggaaacgacacaatcagcatcaacaaatgcaactacggaagaaacaccggtaactggtgaagctactactacggcaacgaagcaagctaatacaccggcaacaactcaatcaagcaatacaaatgcggaggaattagtgaatcaaacaagtaatgaaagggcttctaatgatactaatacagtatcatctgtaaattcacctcaaaattctacaaatgcggaaaatgtttcaacaacgcaagatacttcaactgaagcaacaccttcaaacaatgaatcagctccacagagtacagatgcaagtaataaagatgtagttaatcaagcggttaatacaagtgcgcctagaatgagagcatttagtttagcggctgtagctgcagatgcaccggctgctggcacagatattacgaatcagttgacagatgtgaaagttactattgactctggtacgactgtgtatccgcaccaagcaggttatgtcaaactgaattatggtttttcagtgcctaattctgctgttaaaggtgacacattcaaaataactgtacctaaagaattaaacttaaatggtgtaacttcaactgctaaagtgccaccaattatggccggagatcaagtattggcaaatggtgtaatcgatagtgatggtaatgttatttatacatttacagactatgttgatactaaagaaaatgtaacagctaatattactatgccagcttatattgaccctgaaaatgttacaaagacaggtaatgtaacattgacaactggcataggaaccaatactgctagtaagacagtattaatcgactatgagaaatatggacaattccataatttatcaattaaaggtacgattgatcaaatcgataaaacaaataatacgtatcgccaaacaatttatgtcaatccaagcggagataacgttgtgttacctgccttaacaggtaatttaattcctaatacaaagagtaatgcgttaatagatgcaaaaaacactgatattaaagtttatagagtagataatgctaatgatttatctgaaagttattatgtgaatcctagcgattttgaagatgtaactaatcaagttagaatttcatttccaaatgctaatcaatacaaagtagaatttcctacggacgaggatcaaattacaacaccgtatattgtagttgttaatggtcatattgatcctgctagcacaggtgatttagcactacgttcgacattttatggttatgattctaattttatatggagatctatgtcatgggacaacgaagtagcatttaataacggatcaggttcaggtgacggtatcgataaacctgttgttcctgaacaacctgatgagcctggtgaaattgaaccaattccagaggattcagattctgatccaggttcagatagtggttcagattctaattcagatagcggttcagattcgggtagtgattctacatcagatagtgattcagattcagcgagtgattcagattcagcgagtgattcagattcagcgagtgattcagattcagcgagtgattcagattcagcaagcgattcagactcagacagtgactcagacagtgattcagattccgacagtgactcagactcagatagcgattcagattcagcaagcgattcagactcagacagtgactcagacagtgattcagattccgacagcgactcagattccgatagcgattccgactcagatagcgactcagattcagatagcgattccgactcagatagcgactcagactcagacagtgactcggattcagatagcgattctgactcagacagtgactcggattcagatagcgattccgattcagatagcgattcagactcagacagtgactcggattcagatagcgattcagattccgatagtgactcagactcagacagcgattccgactcagacagcgattccgattccgacagtgattcagactcagacagcgactcagattcagatagcgattcggattcagatagtgactcagattcagatagcgattcagaatcagatagtgattccgattccgacagcgactcagattcagcgagtgattccgactcaggtagtgactcagattcagcgagtgattccgactcaggtagtgactcagattcagcgagtgattccgactcaggtagtgactcagattcatcaagtgattcagactcagacagtgcctctgattcaacgagtgacacagaatcagacaacgactctgactcagaaagtgattcaaatagcgattccgactcaggttctaacaataatgtagttccgcctaattcacctaaaaatggtacaaatgcttttaataaaaatgaggctaaagatagtaaagagccattaccagatacaggttctgaaggtgaagcgaattcgtcactaatttggggattattagcatcattaggttcattactacttttcagaagaaaaaaagaaaataaagataagaaataagtaataatgatattaaattaatcatatgattcatgaagaagccacctaaaaaggcggcttttttacttgggttttccaaatatattgtttgaatataattaataattaattcatcaacagttaattattttaaaaaggtagatgttatataatttggcttggcgaaaaaatagggtgtaaggtaggttgttaattagggaaaattaaggagaaaatacagttgaaaaataaattgctagttttatcattgggagcattatgtgtatcacaaatttgggaaagcaatcgtgcgagtgcagtggtttctggggagaagaatccatatgtatcaaaagcgttagaattaaaagggacaagtaataaatcaaatacttatgaaaattatagagagagtttagaaaacttgattttttcattatcttttgctgattatgaaaaatatgaagagccagaatacaataacgctgtaaaaaaatatcaacaaaaatttatggcggaagatgatgctttaaagacatttttaagtgaagaaaagaagctggaaaaaacagatagcagtagaaattccaatggtttactaggtttaacacatgaacgatacacttatattttcgatacattaaagaaaaacaaacaagagtttttacaagaaattcaagaaataaatttgaaaaatagtgatttaaaagattttaatgatactgagcaatataatgctgacgtagaaataaacaatttagaaaataaagtattaatgttaggttatacattctttagtacatataaagatgaagttgaagaattatatagtgagttagatttaattgttggagaagttcaagataagtcagataaaaaaagagctgtgaatcaaagaatgctaagtagaaaaaaagaggatttggaatctattatagataaatttttcaaagagattaaacaagaacgtccagaaaatatacctgcattaactagtgataaaaatcataatcaatctatggcattaaaattaaagtcggatacagaagctgctaaaactgatgtttcaaaaagaagtaaaagaagtttagaatctcaaaaatataaatctacatcaaaagaagtctctgaacaacaaaaagctgactacgaaagaaaagctaaagaaagaaaagaaagatttctagatagacaaaaaagtaaaaaagaaccggttgtatcattagaatatgattttgaacacaagcaacgttttaataacgcaaatgaaaaacaacttgttgtttctgcgccaacaaagaaaccgacaccacctacatatactgaaacgactacacaggttccaatgcctacagtagaacgtcaaactcaagaacaaattgtttataaagcaccgaagcaattggctggattaaatggtgaaagtcatgatttctctacaacgcatcaaacaccaacaacttcaaatcatactcacaataatgttgtagaatttgaagaaacgtcggctttacctggtagaaaaacaggttctttagttggtttgagtcaaatcgattcatctcatttaactgaacgtgaaaaacgtgtgattaagcgtgaacatgttagggaagctcagaaattagttgaaaactataaagatacacatagttataaagaccgtttgaatgcccaacaaaaagtaaatactttaagttcaggtcatcaaaaacgttttaataaacaaatcaataaagtatataatggcaaataatattaatgtatggctgcaaagcaaataatgagtttgccgtaaaaataacaacattttaaactagcaataaataatatcaaagtcatcatttcaatgatgcaatctagtatagtccacattctaaacaggtgtggactattactttttttactttatattacgaaaaaattattatgcttaactatcaatatcaataattaattttaagctgaaaaacaataaaaatgttaagacaacgtttacttcaagttaattattatactgaaaattctggtatataatgctgttagtgaatataacaggaaaattaaattggttataatattgagtctatataaaggagaaataacagatgaaaaagaaattatttgttttaactatgagcacgctatttgctacacaacttatcaattcaaatcacgctaatgcatcaacagaaagtgttgataaaaactttgtagttccagaatcaggaattaataaaattattccagcttacgatgaatttaagagtgcaccaaaagtaaatgttggaagtttagctgacaacaaaaactttatagcttctgaagacaaattgaaaaagatttcggatccttcagcagcaagtaaaattgtagataaaaactttgccgtaccagaatcaaagttaggaaacattgtaccagagtacaaagaaatcaataatcgcgtgaatgtagcaacaaacaatccagcttcacaacaagttgataagcattttgttgctaaaggcccagaagtaaatagatttattacgcaaaacaaagtaaaccaccacttcattactacgcaaacccactacaagaaagttattacttcatacaaatcaacacatgtacataaacatgtaaatcatgcaacggattctattaataaacactttattgttaaaccatcagaagcacctagatatacacacccatctcaatctctaatgataaatcattattttgcagtgcctggatatcacgcgcataaatttgtaacaccagggcatgctagcattaaaattaatcacttttgtgttgtgccacaaataaatagtttcaaggtaattccaccatatggtcacaattcacatcgtatgcatgtaccaagtttccaaaataatacaacagcaacacatcaaaatgctaaagtaaataaagcatatgactataaatactactattcttataaagtagttaaaggtgtgaagaaatatttctcattttcacaatcaaatggttataaaattggtaaaccatcattaaatatcaaaaatgtaaattatcaatatgctgttccaagttatagccctacacactacgttcctgaatttaagggtagcttaccagcaccacgagtataaatattggcactaagtttacgagatatgataaatacctattattttaaatatagtctacaatctatgtggttgtaggctgtatttttttacgctaagtgatatacatctatcaacaaattattttgcttttctactttgaaagttgaatagtaaaataatcttaaataatcattttattaattaatataaatataagactcgaaataatagttaatagtttgtttatcgcaagttaattattgtttctaaaatattggtatataattttcaatggcgaagaaaacagggtaaaaaagtcggtttttaaatcaaagcaaataagggagcataaagaaatgaaaaggaaagtactagtactaacaatgggtgtaatttgtgcaactcaattatggcattctaatcacgcaaacgcattagtgacagagagtgttgaaactaattttgttgtaaaagattcggataatgaaaatgttttacaaacccatactgaaattactactgaggagaaattttcaatagtagaaaagagtcaattaaataaattaaaatcactatctaatgacaactacatagaatatgatttacatactaatcaaacaggcattaaaaaaggttggttatatggttatagtgaaattgactcatcacatttcacagaccgtgacaaacgcgttattagacgtgatcatgttaaagaagcacaaagcttaattaacgattataaagatacacaaagctatgaagatctcgctaaggcaactgcaaaagtaagtacacttagtcagtctcaccaaaattatttaaataaacaaattgataaagtgaataataaaatagagaaaactgaaaaacgctaatccaaagtaaattataagttatacatctcgtttttaaatgacaatttatccccgtaaatataataaataatcttttcaaattccgcatagatatagagacgctaataaacctctttgtctcgatatgatagtctgcaacgattcatgttgtaggctatttaattttacaaataaggctaaatatataagttctgacacctaaaatatagaaaatacataaaagtaagtatagttattttattataattattaaatttttattaattaattgtaaaaatgtagaattataattaattaacgtttaatattaaaattaactaaaaagaaagaggtgttagttatgacagaatacttattaagtgctggcatatgtatggcaattgtttcaatattacttatagggatggctatcagtaatgtttcgaaagggcaatacgcaaagaggtttttctttttcgctactagttgcttagtgttaactttagttgtagtttcaagtctaagtagctcagcaaatgcatcacaaacagataacggcgtaaatagaagtggttctgaagatccaacagtatatagtgcaacttcaactaaaaaattacataaagaacctgcgactttaattaaagcgattgatggtgatacggttaaattaatgtacaaaggtcaaccaatgacattcagactattattggttgatacacctgaaacaaagcatcctaaaaaaggtgtagagaaatatggtcctgaagcaagtgcatttacgaaaaaaatggtagaaaatgcaaagaaaattgaagtcgagtttgacaaaggtcaaagaactgataaatatggacgtggcttagcgtatatttatgctgatggaaaaatggtaaacgaagctttagttcgtcaaggcttggctaaagttgcttatgtttacaaacctaacaatacacatgaacaacttttaagaaaaagtgaagcacaagcgaaaaaagagaaattaaatatttggagcgaagacaacgctgattcaggtcaataatgctcattgtaaaagtgtcactgctgctagtggcacttttataatttttagatcacgttatgatttattatcaaatcagaattaaaaaagtaaatgatatcaaaatcaagtgtatttaatattagaaaataaaaattttaaatttagtattaaaatgaaatattactatatatttcaatgtgtattatcacagaaaataaaataatgctttacttctatatttaaaagtgtataatgaaagttaagtaataaagagcgtgaagaaaaatgtgagttatttatatagaatattctccttttcatttatgaatttgttacaaaatatttagtgcaaaagcacgacggaggtattcaatatgaataacggtacagttaaatggtttaatgcagaaaaaggttttggtttcatcgaaagagaagatggtagcgacgtattcgtacacttctcagcaatcgctgaagatggatacaaatcattagaagaaggccaaaaagttgaattcgacatcgttgaaggcgaccgtggcgagcaagctgcaaacgtagttaaaatgtaattttaacttattcaaacagtccttattatagggctgtttttttatgctttaaatcgataacagttggtgtggtaaaagcactagctgttattttttttggtccaataaatttaggtggagatctaacaatatataatggttctataataaatcggactgatggaaaagttttttacttttcatctgtccgacttttgattttgaatataaaaaaagcgccaatacagaactttaataatgacgagaattaaagtctgtatatggcgataacaagaagtaatgttaaacactcaaaatgtttaacaataataggataccacatcgcataatatcttactacttaattaataatttaactaatcaactttttgttaattttttattaagactgattaattattgataatatttattgtttttaaaatctcataataattcagtaatcttgttttcatttaaaaggcgaaaaattaaaataattaaataaaaatattgcgtttaatttacagcgtcaaatatacttatttctaatgctttggggtctactgaaacaagtagagaatgatcgatgttactaatattgccattctccaaatctatttctgtgagtatttggaagctaccattaggcaatggtttaacaatagacaattgcttttccgcttgttgtattaaaaaaggttttgtagattgattattaatatgccattcactcatgtaagtttttcactcctgctttaaaatagggttagaaagtttatagttgagacattcatgttcaaccaaaattttgttcaaattcaataaatgtcttgtttaaaatagaaatattgtaaatgttatcgtccaaaacttcaccagttaagtatttgttttgaattaaaatttggcagttagttaagaattcttgataatcacgatcgcaaaaatagttttcacgtgcatctttagcatcgccaaaaaagttagcgactgtttctgtttctccattattcgaacgttcaatatataatttgtaaaatttagctattgtatacttttgttctttagttagttcattcaaaatattgggcctcctgaaataccatttgtaatctatacccaatttattgcaaaacacaaactaatttaactatttgatgaaactgtattaataagctttaacaagccttagtttgtatgaatctataaaattatctttaattgcatagggtgaaataatatgtagtccataacttttaactgatttttcacttacaccaaatttataagcttgatagataattttagtacaatacgtaaattttttgctgttcaaatttaatgtaactagataacgatgatttgtattttcatagtttttcttaacccagtcagccgcttttttacctgcaccaggatagctgcaacgataaactttcatccaatcatttttgccacttgcataattatatttaaaagattcgaaggattgtgtagttggtttgtcgccaggcccctcaatttgtaaaatcgttttatcatcaatcgcgatactacaatgaccaaaaaatccccacatgacagggccttttgtaataataatatcaccaggttgtaattggaatttgtcatcttgaatttctgaatacttattatctgcaattgtttttggtgagtttataggggatacgacaacgaataatataagtaaaattatcgttcgtttaatatagttcacttaaaagctccttgttgaagaaatatatgtaaatagtcttaaattagaattgtaatctttaataagtttgtaagactaaaacatatcttaaatattaaagtatgagagtgtgaaatgtctattaagaataaaaaacagtctaaaacatctttgagacgtttcagactggatataaattgaatttcatttatagtacaccaaatataaatgtgtatattaaaatagcgaatccgaaaatatagagaatgacagtgaaacttaaataggattcttttttagattctttgccagtttttttcattaatacgagtataaacgtagcggcaactaagaaaattaatgctagccaaaacagaattgcaaaatgtaaagacatgtcaaaccctccttatataccgtaattattaacctataaaactataaaaaataggataaatgtaatagagaacgagtacgatatttataaaaaataatatttcacttaaccagtttttagttatcattgcaatggtaaaggatacaatgagtatcacaccacaaatgataataccaggcaggagccaacataaatcatctaaatctttattatatgtgattaaaatattaaagataacaaaagtggtagtaataactatattgatagcatttaacaaaatgttattcatgattgacacctactagtattaaaatagcttcttaataaatatgataacactattttccaataggtaaataaaaagtatagttatttttaaaatattatttgtagaatgctaaagtttattaattcaaacaagtgagcatatataggggtgtatagtattaatatgaaaagaatatttacatactaaaaacccttaaagttgtacaattcgttaatatttttagaatcagataacaaaaaaatgtgcaaaatcacttttgcacatttacaaatactagttttctgataagattaataataacactttaaatagcgcttaataaatgaagggggcaagtcttatgacgttttacaatttcatcatgggttttcaaaatgataacacaccatttggtatattggccgaacacgttagtgaagataaagcattccctcgattagaagaaagacaccaagtaattagagcatatgtgatgtctaattacacagatcatcaattaattgaaactacaaatagagctattagcttatatatggcaaattaatttgagtagtaccaattatgatgtattagtgcatcccaaatatcttttgttttaaagtttatttcatcatttcttatcgaaaatggtgtaataatgtctttatctaaccaagtgtttataagttcatttggtacaccatctaacaacatttcacttttactaattataaaacattcccagtcaagtgaaacattttgtggattcacataattacattgattatgattatccataaacactcactcctttaaaattctgtactcttcattgcgttttaccccgtcacattatcttttaaactaaaatcatcattacttatgaaaaaaatgtacatcaaaagcaaaggttttcgctaccgaaaaagtttaaataatggtttaatatatttggtactcattttaataaaaagagaatacattttgagctatcaatactttttattgaagaggtgttattgttggctaaaacgttatatttaatgcgccacggacaaactttgtttaattttaagggactaattcagggatttggagattcgccgctaacagaacttggaattgctcaagctcaaaaggcacgtagttattatgaaactaaggggataaacttcgatttatatgcatcatcaacgcaagaacgcgcaagtgacacacttgaaaatgttgctcctaaccaatcgtatcaacgttttaagggactaaaggaatggcattttggattatttgaaggtgagtcagtctatctatttgataatctatacaagcctgaggacttattcggagatcgaattgttcctttcaaaggagaggcaaggcaacaagttgaagatcgcattgtgaaaactttacatgacattatgtctcaaacaaagaataatgcattagtcgtgagtcatggaacaataatgggagtatttttaagatattgccttaaactagatgaagcattaaagcataatatcggtaattgtaatatcctgaaatttgaatatgacaatggaacatttaaatttgttgagttaattgatccaaatttataataaataaagcgttatacatagacacaagtatgtcttttgtataacgcttttaaaatacaactatataacgctttagaatattaattgaataagtttttgtaatatcatcagagcgacaataataattattatacttgatattttattgattattgttaataattttccggttttatcaattgatccaaccattttacctaaaattgcgagtaaaaagaaccataaccatgaaacgctgatacaagcgattgtaaacgcaattttattgctgccactatataatgcagcactactaccaattacaccaattgtatctaaaatagcatgtggattgagtaaagaaactgataaagcaaaacttacttgtttcattggagacataatttgagcttctccatctgttgagggtttatcatgccaaatggtccaagccatatacatcaagaaaattaaaccaactatataaataattgcttgaagtacaggtaaagacataataatgatagatactcctaccactgcaataataataagtaagctgtctgacaacccggctgtaattattgcaggcaatacatatctatattttggttgattagctccttggttaaaaataaatacattttgtgcacctaaaggtaaaattagaccaatcgctaagataaatccatgaataattgcggttaccattaagttttgacacccctaaaaaatagaatattctgaaaaaatttattgatatcatatcaaataaaaaacaactactcaatagtagagtagttgtatgaaaaaaagattaatatatgatttgaatttatgagaaatgtagaatatataaaactgtattacttattaatcaaatcataaaaaagccaatgttcatcgaaataggtatttccgattttaattgcatttttctcaaaaccaagaatgtcgaatcctagtgcactatagaaaactttagcacctatgttgtttgacacaattgatgtaagtaaagattcgtaattgttctgccgtgcataattaataatgaaattaatgagctcgctatttatcgatttatcgttattagtaacaaagttgtatttaattaatgatttatgttcttttccaacgtatcgaatttgttctaaggcagctgttgcgataagtgcttcgttttcataacagccaaatacaatacatttcggtgaaccttgatttaaaatgtcatgtattaaggtgtcagtcattgtttgactataatgtgaatcttgagtgaattcttcattgactgtcgaaacaagtctcttatactcattaaaatcattattcgttaatgttttaatttcaatcattactgacctccttaatcattattaagaaagattttgtactaaaaaaatttcttaattacatattaaaatgtttattaaaattttgcaatcattgatttatatgcacattcttgtaaatggattatcaatttaattatatttatttttaagttcaggaaattatggaattggttattggtcgacactggacttttatttgtagacggtatgcgaagaagtcaagccagtattggaaccggtcacatttatgatgattaagagacaattattttcagttaaatattgccagaaatttcaatcacgattagaaaaaataaccaaccaaaaatttttggttggcaaatttgaattttatgtgaattttattaataacgttgaataatctctttaagttaatgctaatctacaacatttacatttaaatcgacattaatatttccttgagtcgcttttgaatatggacaaaattcatgagccatttgtaaatatttttcagcttcttcttgagatataacatttttaattgtcgcatcaattgaaacacttaatttaggactttctgagtctggatcatcttctagtctcactgttagtgttacttctggatgagcatcacgcactttgttttgctttaaaattaggtcgaaggcaccgttgaagcaagatacataacctgctgcaaataattgttcggggttagtagctttaccatctgcttgagcaggcggaacgatatcaatatctaatgctcgatcatcagtataaacatgtcctttacgtccgccaacattcgtcgctttagtttcataatgtattgccattcttataacctcctaatttaaaatacatttatgctttacccattagaaaataccttaatcatattcatttatagcattgtttgattgaaggataaaaagttgttgtttacaataaaaataatgagtatctgaaatgagggatttactatgacacatgtggaagtagtagcgactatcgcgccacaattatatatcgaagaaactttaattcaaaaaattaatcatcgtattgatgcaatagacgtattagaattacgaattgatcaaattgaaaatgtcacagttgatcaagtggcagaaatgattacaaagctgaaggttatgcaagattcatttaaattattagttacgtatcgtacaaagttacaaggtggctatgggcaatttacaaatgacttgtatcttaatttaatatcagacttagcaaatatcaatggcatagatatgattgatatagaatggcaagcagatattgacattgaaaaacatcaacgaatcattacacatttgcaacagtataataaagaggtggttatatcacatcataatttcgaaggtacgcctccattagatgaattgcaatttatattttttaaaatgcaaaagttcaacccagaatacgttaaattagcagtaatgccacataataaaaatgatgtgttaaatttattgcaggcaatgtctacattttcagatactatggactgcaaagttgttggtatttcaatgtctaaacttggactaataagtagaacggctcaaggcgtttttggtggtgcgttgacttacggttgtatcggagaaccacaagctccaggacagattgatgttactgatttaaaagcgcaagtgactttatactaataaaatgaattaggttgcttttgtgtaagtgctgtcttataattgagaagtattatcattgttcgtggaggagcgattttagatggaattacaacaagcaatagctaatagaagaagtgtgaaaaaatttaaaagagatatgcacatagatgacgcattgctatatcaagcaattgagaaagctgctgatgctccaaatcacggaatgagggaaccatggagagttgtgcatgttccgaaagacagattaggagatatgagtaaggatatttctaaatttgcattttctaatgaattagataagcaacaatgtcattatgatgcagtaacgaaactaggtggcatgttattgcttattttaaaaacagatccaagacaacgtcaaaatgatgaaaactactttgcatttggtgcatatgcacaaaatcttatgttgttactttatgaagcggggataggtacatgttggaaatcgccattatatatctatgatcctaaagtaagaaaaacacttggtataaagaaagatgaagttcttgctggattcttatatttaacggatttagaagaagatatgcctaaagcaccacgtaaaaatagaaacttaattacattatattaatatgtataattatagaaaacattaataaaagctgagacatgaattgatggacatctatcgagttagagatttaatctaatttactagagtcggtacaatcacagtctcagctttttattgtgcagtatatacacatttgtattttagtatttatttaaaagtttctgctaaaaatgattcaacttgttcaggtgacttagcatttgctgaatgaaggtgtgcaattttgtcgccgtttttaaatactagcaagctagggatacccataacttcattttcaacaactacatcttctaattcatcacgattaacagtataccattggtaatcattatattgttctacgattgggtcaatccataaatccatagcacgacagtctgggcaccatcctgcctcaaatttaacaattacaggtgtatcgctattaattatagatttaaatgattcattacttttgattgcttgcattgtaacaactcctctagatagtttaataatttttattatagctaaatttatatcataataaaaaattttagcttcaaaatgaaagccttttgctatggaaaatgatatatttattttaaatacataaaggaggttgcagtcgtatgattaaattttaccaatataagaattgtacaacttgtaaaaaggcagcaaagtttttagatgaatatggcgtaagttatgaaccaattgatatcgttcaacatacacctacaataaatgaatttaaaacaataattgcaaatacaggcgtagaaattaataaattgtttaatacacacggtgcgaaatatcgtgagcttgatttgaaaaataaattacaaactttatcagatgatgaaaagttagagttgttatcatctgatggtatgttagtaaagcgtcctctagcagtaatgggcgataagataacattaggattcaaagaagatcaatataaagaaacttggttagcgtaagcgtaatgtaaacgtttactaaatatctcgatatttagattcattacatgtaaaatgaaataagctatacaattgttaatttttataaatatagttgaatagcatctagccttatggcatcattaatgatgtaaagattaattaggaggggattctcttggcagtaccaaatgaattgaaatattcaaaagagcatgaatgggttaaagttgaaggtaatgtagcaacaattggaatcacagaatacgcacaaagcgagttaggtgatattgtttttgttgaattaccagaaacagatgatgaaattaatgaaggggatacgtttggtagcgtagaatcagttaaaactgtatcagaattatatgcaccaatctctggtaaagtagttgaagtcaacgaagaactagaagatagtcccgaatttgtaaatgaatctccatacgaaaaagcatggatggtaaaagtagaaattagtgatgaaagtcagcttgaagctttattaacagctgaaaaatattcagaaatgattggtgaataatcaccgtgtaactccttaatctaagattgaggagtttatttttagtctgagtaagtaaataatatgaaagaaaatttattaggcactattatttggagtattgttacattttattattcaagaatgatgaaaataatgaatttagctattttaaaaataaaaattgggggaagttaatatgctaaacattcaagacgttagtcatctttctaaaaaggagcaaaaagcatataaccgtttcgtagaatctgtagaaaacggtaatttaccagtactaccatgtattgaaatagatctaaaagagatgcaagaagaaactttaagccagagtaagattggtggaatgccatttttaaaatcttttaaagatataccattagatgaaaataatgtaccaatggtattgttagcacagattaatttgaatgatcttccagaacaacaagaattatttcctgtaaatgaagggatattgcagttttggattagttcagaagatcaaatgtatggtatgtctgaaaatttaaagggaaacaatataaactcaaggcttgtttatataaaagagccaattacagatttatcacttgaaaatattcaaatgcatttgaagtcattagatgctgataatgaggatatcccgttcagtggagcattttctatagaatttagattgtcgaaacaaactattacatgtactgattataagtacgatgaggacgtgcttgcattgtggaataaagtcaatccatccttcgcgctaaaatcgatgtttggtggatatgatgaattaatggaacctgtgtgtaacacatttactgctaaggagccatttaatcaacttggtggttatccatattttgaccaaatagatccaagaacgaacgatcaagaactgaaaatgtatgatagagtcttactgcaaattgattctacaagagatggtaattcttcgattatatggggtgatttgggtattgccaatatcttagtaaaatctactgaccttgaggctatgaagtttgatgattacatgtattcatgggattgcagctaagagaatcataaaaatatattactttaataagtgtagtaactatagatcaatctagggagtgggatagaaatgaaaaagaaccactagtgatttataatgtagtggttctttttcataagccacagctaatgtgtacttaaaaataggaatacatgagtaaaactcatgcataagaaatactaatttctaaagaaaaagtatttctttatgttggggtccaccccaacttgcattgttcgcagaatttcttttcgaaattctctgtgttggggccccgctataattgaaaaagcttgttataggtgtattttcttttggttaactattggtaatataacattgtagattttaggatgttgatttatggtttagcctttgtctgtttatgtaaaatgtcctagctagtcaaacattgagtttgtaattattatattaagctagtttaaattttttgtgatttatgttttattcataccaattttgtgaaatgatacagtgacagatgtttattgattttaaagggtgatgatgatggctattgtaaataaagtgataattgttgaaggaaaatctgataaaaaaagggtgcaacaggttattgcagaaccagtcaatattatttgtactcatggaacaatgagtatagataagcttgatgatatgatagaatcactatatgataaacaagtttttgtattagccgattctgatgacgaaggagatcgaattagaaattggtttaaacgttatttgagtgaatgtgaacatatatttattgataaaacttactgtcaagttgcgaattgccccaaacaatatttggcgcatgtactttcaaaacatggctttacttgtaagaaagaaacaccttccttaccgaatataaataatgaaaggttagttttagtaaatgaataattcattagacatcaaagatgtaactacattttatgaggaagacaaacatttaatctttggttatacaccaacatgtggtacttgtaaggtttcagaaagaatgttagacattgctaatgaaatattgcagttgccattattgaaaatagatttaaacttttatcctcagttttgtaaagatatgcaaatcatgtctacgccgattttattgttgatgaataaagataaagaagtaaagcgaatttatgcatttaaatcggtgactgatttgttagaaaatttaaaatagttattgacgaaattttactaaggtgttaggattaatacaaattaaatgatgcgtaaactcttatcgagagtggtggagggatgtgccctacgaagcccggcaaccgtcttatatagaaatggtgccaattcacataaagttttaacttttgaagatgagagaaacaatactactattgctttctcaatttttctatcgatattgagaaagcattttttattttattaagcaacacagggaggaatcaacgtgattgaattaaaagaagttgttaaagaatatcggactaaaaataaagaagtccttgctgtagatcacgttaatttatcgattcgagcaggatcgatttatggcgtcattggtttttctggagcaggaaaaagtactttgattcgaatgtttaatcatttagaagcgcctacatcaggtgaggttattatagatggagaccatataggccaattgtccaaaaatggattaagagcaaaaagacaaaaagtaagtatgatcttccaacattttaatttgttatggtcaaggactgtgctaaaaaatattatgtttccgcttgaaatagcaggtgtccctagaaggagagcaaagcaaaaagcattagaacttgtcgaactcgtcggtttaaaaggtagagaaaaggcttatccatcagagttatcaggtggacaaaagcaacgtgttgggattgcacgagcgttagctaatgatccaacggtcttgctttgtgatgaggcaacaagtgcacttgatccgcaaacaacagatgaaattttagatctactactaaaaattagagaacaacaaaatttaacaattgtactaattacgcatgaaatgcatgtcattcgtcgtatttgtgatgaagttgcagttatggaaagtggtaaagtgatagaacatggaccggtgacacaggtttttgaaaatccgcaacacactgtgacaaaacgatttgtgaaagaagatttaaatgatgatttcgaaacatctttaacagaattagagccattagaaaaagatgcttatatcgttagattagttttcgctggttcaacaacaaccgagcctattgtatcgagtctatcaactgcctatgatattaaaattaatattttagaagcaaatattaaaaataccaaaaatggaacagtcggctttttagttctgcatattccatatatttcaagtgtagatttcggaaaattcgaaaaagagttaattgagcgacaagttaaaatggaggtgttaagacatgggtaaatcatttagtgaaattataaatgaaatgattacaatgcctaatattcagtggccagaagtttggactgcaatagtcgaaacactatacatgacagtcgtctcaactatatttgcatttatactcggtcttattttaggtgtgttattattcttgtctgctaaaggtaagtctatcggtgcaaggttattttattctatcgtttctttcattgttaacttatttagagcgataccatttattattttaattttattattaataccatttacaagtttgatacttggaacgataagtggtccgacaggtgcgttaccagccttgatcattggtgcagcgccgttttatgcaaggctcgtagaaattgcttttaaagaaattgataaaggtgtcatcgaagcggcctggtcaatgggtgctaatacttggacagtaattcgtaaagtcctcttacctgaagccatgccagcgctagtgtctggcattacagttacagcaatcgctttagttggttcaacggcagttgcaggtgtaattggtgccggtggtttaggaaatttagcatacttaacaggtttcactcgaaatcaaaatgatgtcattttagtatcaacagtttttattttaattattgtatttataatccaattcattggggattggcttacaaataaacttgataaacgataaattgggggtttcattttatgaaaaaattatttggtcttattttagtattaacatttgcagttgtattagcagcttgcggtaatggaagcaaaagtggcggtgacgacaagaaaataacagtaggtgcttcaccagcaccacatgctgaaattttagaaaaagcaaaaccattattagagaaaaaaggttatgaactagatattaaaacaattaacgattacactacgcctaataaattactagacaaaggtgaaattgacgcaaactatttccaacacacaccatatttaaacacagagaaaaaggataaaggttacaaaatcgtaagtgccggtgatgttcacttagaacctatggctgtgtactctaaaaagtataaaagtttaaaagaattaccaaaaggtgcaacagtctatgtgtctaataatccagctgaacaaggacgtttcttaaaattcttcgttgatgcaggtttgattaaaatcaaaaaaggcgtaaaaattgaagatgctaagtttagtgatattacagagaataaaaaagatattaagtttaataataaacaatcagcagaattcttacctaaaatttatcaaaatgaagacgctgatgctgttatcattaattcaaactttgcaatcgaacaaaaactaaatcctaaaaaagattctattgctgtagaaagtgcgaaagataatccttatgcaaacttaattgctgttaaagaaggacatcaagatgataagaaaatcaaagcattaattgaagtattacaatctaaagatattcaagactttattaatgaaaaatacaacggtgcagttattcctgctaaataattattaattagagctcattgactgatatgctcccatcaaagtagacattgaaaaaatgcaaactttgatgggagtttttttaaattagaatcaatatgaaatgtggaagatttaatatgataagagatggataactatatataaatgattatcaagtcattatgtattaagtgaaagcctatatgattctgtgacttcaatcaatgtccaaagctttacaatattatataagcagtagttgattgaatgaaaatacgattgtaacaacctttttacaataattgcggggccccaacatagaggatttcgaaaagaaattctacaaacaatgcaagttggggggcgaggccccaacatagtagctggcggaaaggcagcatacaataatgtgcaagttggcggggccccaacatagagaaattggattcccaatttctacagacaatggaagttggggtgtgacgacgaaataaattttgcgaaaatatcatttctgtcccactcccaagaaccattacataataaatcaatagtgattctttattatttcagtcgcactccctcaagttaatgatgaatctatttcgctagttataaaatgacgtcaaatcaatatcaaaaattatttaagtaaaatgtttagataatttttcagtgggtaagtattatatataacatttaattattccgaggaggcatttattatggcagacgaaagtaaatttgaacaagctaaaggtaatgttaaagaaacagtaggtaatgttactgataataaaaatttagaaaacgaaggtaaagaagataaagcttctggtaaagcgaaagaattcgttgaaaatgcaaaagaaaaagcaactgattttattgataaagtaaaaggtaacaaaggcgagtaattttactttttattcctaatacactgcacatgccacttagtcggtataaccatcggctaggtggttttttgtattaaaaaagtggataccaaaatttattaataattattttaatgttagaaaaaaactaaataaaaactcgctaatgatatccaataatatgtatacaaaacgagacatatattgcatatgattaacgagatactgaatatattttatcacccctaaaatgattattcattttcagcggtaattcgacctaaagtcaaacttacaataaaaccgatgataaatactactaatgaaacgaaccacatcacgatattagttggtaaacctggaaatactgcaaagagggagccaacaacaaaaccaatgattaacgcaaaagtcattagtttatgatgtgttaggaaatactggataattttgcttgaaataatgaatccagcaagcacgccaaatccgactgcaagtaatataggaagaccggcaaagttaagtttaacaacttcagatatggctagcatgactgtgccatagacgccaaatactaataacataaatgaccctgaaatacctgggagtaacatagcactagatgcacacatacctgcaataaagtatttaataataagaccagttgatagagtaagtgtttctccagcatgtttatcgccattattcattaatgtaataacaattaagatagcgataccagctataaccatcatgtaatgtttagttgtaaatgacgttttatagttagaaattttcaataaatatggaacgataccaatgattaatccaccaaagaaaaacatagttggaatatggtgttggcttaataaataattaaaaagattacttagtgatcccattgccagtaacattccaattataatggggattgaaaatgtaaaacttggccaaaaacgtcgtgagaatatgccgctaattgaagcgataaattgattgtatatatctaacaataatgcgatagtcccaccgctaacaccaggtaccaagtcactcgttcccatagcaaaacctttgagaatattaatccatttaaattgttgcatgaataactcctttcaaacgattggaataaaatcataaatagcatcataccatattacaaatgtcctagtgaaatgataacatattttaaattcataaaatccattgagaaattatgtctacttattatcatttatatttttaaaagagagcggattagagttgtactttagagttattaaaaataataaaaagggtttaagttgtttatattaaggtataagtaagttataattaactgaacgcattattacaaagtctttttgactacaaattaaaattattataaactagttaagaaaactttatattttacggagggaatataaaatggcatcaacattagaaatcaaagacctacatgtgtctattgaggataaagaaatcttaaaaggtgttaacttgacaattaacactgatgaaatacatgcgattatgggaccaaacgggacaggtaaatcaactttatcatctgcaattatgggacacccaagctatgaagtaactaaaggagaagtacttttagacggtgtaaatattttagaattagaagttgatgaaagagcaaaagcaggattattcttggcaatgcaatatccatcagaaattacaggtgttacaaatgctgatttcatgcgttcagctatcaatgcgaaacgtgaagaaggacaagaaatcaacttaatgcaatttattaagaaattagataaaaatatggattttctagacatagataaagacatggcacaacgttatttaaatgaaggtttctcaggtggagagaagaaacgtaacgaaatcttacaattaatgatgttagaacctaagtttgcaatcttagatgaaatcgattcagggttagacatcgatgcattaaaagttgtatctaaaggtattaaccaaatgcgtggggaaaactttggtgcattaatgatcacacactaccaacgattattaaattacattactcctgataaagtacatgtaatgtatgctggtaaagtcgttaaatctggtggtccagaattagcaaaacgtcttgaagaagaaggatatgaatgggttaaagaagagttcggttcagctgaataatcttattaatacagtatccatgagatgttcatctatatatgatgaaaatgaacatttatacgaaatagtaaatttcatcaagtaggaggaaaaagttatgacaactgatattttgaacatttctgaagaacaacttgttgattattctaaagcccacaatgaaccttcttggatgacagaattacgtaaaaaagctttgaaattaacagaaactttagaaatgccaaaacctgataaaacaaaattaagaaaatgggattttgattcttttaaacaacacgatgtaaaaggtgatgtttatcaatctttatcacaattacctgagtcagtaagagaaattattgacgtaaatcattctaaaaacttagtaattcaacataataatacgattgcgtacacacaagttgatgataatgcatcgaaagatggcgttatcgttgaaggtttagcagacgctcttatgaatcatagtgatttagtacaaaagtactttatgaaagatgcagtaacagtagatgaacatcgtatcacagcgctacacacggcattagttaatggtggcgtatttgtttatgttcctaaaaatgtagttgtagaacatccagtacaatacgttgtgttgcacgacgacgaaaatgcaagcttttataaccatgtcatcatcgttactgaagaaagcgccgaagtcacatatgttgaaaattacctatcaaatgcatctggtgaaggaaatcaattaaatattatttctgaagtgattgctggtgcaaattcaaatatcacatatggctcagtagactatatggataaaggctttacaggtcatatcattcgacgtggtattactgaagcggatgcctcaattaattgggcactaggtttaatgaatgagggtagccaaattattgataatacaacaaatttatttggtgatcgttctacaagttcacttaaatcagtagttgtaggtacaggcgaacaaaaaattaatctaacatctaaaatcgtacaatatggtaaagaaacagatggttatatccttaaacatggtgttatgaaagaacatgcatcatctgtatttaatggtatcggctacattaagcatggtggaactaaatcaattgctaatcaggaatcacgtgtattaatgttatccgaacatgctcgtggtgacgcgaatcctattttattaattgatgaagattatgtacaagctggtcatgctgcatcagtaggtcgtgttgatccagatcaactttactatttaatgagtcgtggtatttctcaaagagaagcggaacgtcttgttatacatggtttcttagatccagtagtacgtgaattacctatcgaagacgttaaacgtcaattgagagaagtaattgaacgcaaagtttctaaataatattttgaaaataaaagtttgtaatagatatagactgtcgatattggtataagactaatacaacgtcagtatttaaatgattaggatttttatttaagaaaggtcgtgaatgaagtggccgaacactcatttgacgttaatgaagtaatcaaggattttccgatattagatcaaaaggtcaatggcaaacgtttagcatatcttgattcaacagcgacaagtcaaacgcctgtgcaagtgttaaatgttttagaggattactacaagcgttataattcaaacgttcatcgtggtgttcatacattaggatcattggcaactgatggttatgaaaatgctcgtgaaaccgttcgtcgttttattaatgcgaagtattttgaagaaatcattttcacacgcggaacaactgcatcgattaaccttgtagcacatagctatggtgatgcaaatgttgaagagggcgatgaaattgttgtcactgaaatggaacatcatgccaatattgttccttggcaacagttagcaaagcgtaaaaatgcgacattgaaatttataccaatgacagctgacggggaattaaacatcgaagatattaagcaaacgattaatgataaaacaaagatcgttgctattgcacatatttctaatgtactcggtacaattaatgatgttaaaaccattgcagaaatagctcatcaacatggtgcaattatcagtgttgatggggcgcaagcagcaccacatatgaaacttgatatgcaagaaatgaatgctgatttttatagttttagtggacataaaatgcttggaccaacaggtattggcgtattatttggtaaacgtgagttactacaaaaaatggaaccgattgagttcggtggcgacatgattgattttgtaagtaagtatgatgcaacatgggctgatttacctactaaatttgaggcgggtactccattaattgctcaagcaattgggcttgcagaagctattcgatatttagaacgcataggttttgatgcaattcataaatatgaacaagaattaacgatatatgcttatgagcaaatgtctgcaattgaaggaattgaaatttatggcccgccaaaggatcgtcgtgcaggtgtaataacgtttaatttacaagatgtacatccacacgatgttgctacagccgtagatacagaaggtgtagcggttagagctgggcatcattgtgcgcaaccgttaatgaaatggttaaatgtgtcttcaacagctagagcgagtttttatatatacaacacgaaagaagacattgatcagttaataaatgccttgaaacaaacgaaggagtttttctcttatgaattttaataatctagatcaattatatagatctgtcattatggatcattataaaaatcctagaaataaaggtgtattagataacgggtctatgacagtagatatgaataacccgacatgcggtgaccgtatacgactaacatttgatatagaagacggcattataaaagatgctaagtttgaaggtgaaggttgttcgatttcaatggcaagtgcatcgatgatgacacaagctgttaaaggtcattcacttggagaagcaatgcaaatgagccaagaatttacgaaaatgatgcttggtgaagactatgtgattacagaagaaatgggagatattgaagcattgcaaggtgtatctcaattcccagctcgtattaaatgtgccacattagcttggaaagcattggaaaaaggtactgttgctaaagaaggtaaagcagaaggtacgactgaagaagaatagaatgctgttaatcatagatgattttgataatagacatataaaagtataaaaatttttataagatgtcatgtcattgttataatatggtttacatcatgaattaaaaacttacgcacgccgttgtaaatatatttttaaggagtgattgaaatggctaaaaaagcacctgatgttggggattataaatatggattccacgacgatgatgtgtccattttcagatcagaacgtggtttaactgagaatatcgttagagaaatttctaacatgaaaaatgagccggaatggatgttagatttccgtcttaaatcattaaaattgttttataaaatgccaatgcctcaatggggtggcgacttatcagaattgaatttcgatgacattacttactatgtaaagccttcagaacaagctgaacgttcatgggatgaagtgccagaagaaattaaaagaactttcgataaattaggaattcctgaagctgaacaaaaatatttagctggagtttctgctcaatatgaatctgaagttgtttaccataatatggaaaaagaacttgaagaaaaaggtattatctttaaagatacagatagtgctttacaagaaaatgaagaattattcaaaaaatactttgcttctgtagtacctgcagcagataacaaatttgcggcgttaaactcagcagtatggtcaggtggttcgttcatttatgtacctaaaaatatcaaactagatacgccactacaagcttatttccgtattaactctgagaacatgggtcaatttgaacgtacattaatcattgctgatgaaggtgcttctgtacattacgtagaaggttgtactgcaccagtttatacaactagttctttacactctgctgttgtggaaatcattgtgcataaagatgcgcacgttcgttatactacgattcaaaactgggcgaacaatgtatacaatttagttacgaaacgtacttttgtttatgaaaacggaaatatggaatgggtagatggtaacttaggttctaagttaacgatgaaatatccaaactgtgttcttttaggtgaaggtgcaaaaggtagtacattatctattgcatttgctggtaaaggacaagttcaagatgccggtgctaaaatgattcataaagcgccaaatacatcttcaacgattgtttctaaatctatttctaaaaatggtggtaaagttatttatcgtggtattgtacattttggacgtaaagcaaaaggcgctcgttcaaatattgagtgtgatacattaatcttagataacgaatcaacatcagatacaattccatataacgaagtattcaacgatcaaatatcattagaacatgaagcgaaggtttcaaaagtttctgaagaacaattattctatctaatgagtcgtggtatttctgaagaagaagcgacagaaatgattgttatgggattcatcgaaccatttacaaaagaacttccaatggaatacgcggtcgaaatgaaccgtttaatcaagttcgaaatggaaggtagtattggatagctttaaaccgcgatgttaagctattcttgacttccggaaatgactattgataccattttgataccgaatataacaaaaagccacattactgtggctttttttgttttataactaaatcggattgatagataagctttgtacttatttatcagtccgatttttgatttgtgtaaaaaataatcattgatggtggataaagcgacaacacaaacacaacatgattgtggcattagagtgctggtctttattaaattaattgaaaactacatcaaatattctttaaagataattcgatattagttctattaagattcgttgtataagtgagttaaaataagaaaactattaataatattaagttcactacagatgttgctaatggaccgtaagttttaaagacatctttacttttataaccaacaatcgcatctaaaaattgaactaaaatcattgcaatggatatagttatcaaaaatatagcactatgaatgactaaagaaaaaatagctaataaaaataaaggtaagcttcgactaagtgcataatatgcatttatattatggctagatgcacatgcttgaaatgaataacctaaacttacactggcgctaatgattgtaaatattgctaaaacaaaatacatgttaatccttctttctatatttgaatataaacaagtacttgtctaaagatatttaaaagataattagaataaatttatgagaaacttgttgttatcattataacggtttcaaatcattacaactatgtcataaactgaatttgttgaaatttttcattatgtaaatttattcgtaacaatcaggtcgaactatagcatcattttactaatgaatgcattaaagtaactatgattaaaaatgcatattaattatcattattaagtctattatatataatgaattttaactggtttattaaacgagaacgtcgggaattaagtaactacaataaaaataagatatgacaataaggagactacacgcgtgatcattgccataattatattgatatttatttcgtttttcttttcaggaagcgagacggcattaacggctgctaataaaacaaaatttaaaactgaagctgacaaaggtgataaaaaagcaaaaggcattgtaaagttacttgaaaaaccaagtgagtttattacaacgattctaattgggaataatgttgcgaatattttattaccaacacttgttacaattatggctttacgttgggggattagcgttggtattgcatcagctgttttaacagttgttatcattttgatttccgaagtgatccccaagtctgtcgctgcaacatttccagataaaataacaaggcttgtatatccaattattaatatttgtgtaattgtgttccgtcctatcacactacttttaaataagttgacggacagtattaatcgaagtttatctaagggtcaacctcaagaacatcaattttcaaaagaagaatttaaaacaatgttagcaattgctggacatgaaggtgctttaaatgaaattgagacgagtaggttggaaggtgtcattaattttgaaaatttaaaagtaaaagatgttgatacaacacctagaattaatgtgacggcatttgcttcaaatgcgacatacgaagaagtttatgaaacggttatgaataagccatacactagatatccagtgtacgagggagatattgataacattattggggtgtttcattctaaatatctgttggcttggagtaataaaaaagaagatcaaattacaaactattcagctaagccattatttgtgaatgaacacaataaagctgaatgggtattacgtaagatgactatttctagaaaacatttagcaattgtgttggacgaatttggtggtactgaagcgatagtgtcacatgaagacttaattgaagaattattaggtatggaaattgaagatgagatggataaaaaggaaaaagaaaaactttctcaacagcaaattcaatttcaacaacggaaaaatcgcaacgtatctatataaggagcgaacagctatgtggaataagaatcgacttactcaaatgttaagtattgaatatccaattatacaagcaggtatggcaggaagtacgacaccgaaattagttgcatcagtaagtaacagtggtggattaggcacaataggcgcaggttactttaatacgcagcaattagaagacgaaatagattatgtacgccaattaacgtcaaattcttttggtgtaaatgtctttgtaccaagtcaacaatcatataccagtagtcaaattgaaaatatgaatgcatggttaaaaccttatcgacgcgcattacatttagaagagccggttgtaaaaattaccgaagaacaacaatttaagtgtcatattgatacgataattaaaaagcaagtgcctgtatgttgttttacttttggaattccaaatgaatctattataaaaagattgaaagaagcaaacattaagctaataggtacagcaacaagtgttgatgaagctattgcgaatgaaaaagcgggtatggatgctatcgttgctcaaggtagtgaagcaggtggacatcgtggttcatttttaaaacctaaaaatcaattacctatggttggaacaatatctttagtgccacaaattgtagatgtcgtttcaattccggtcattgccgctggtggaattatggacggtagaggagttttggcaagtattgtcttaggtgcagaaggggtacaaatgggcaccgcatttttaacatcacaagatagtaatgcatcagaactactgcgagacgcaattataaatagtaaagaaacagatacagtcgttacaaaagcgtttagtggaaagcttgcacgcggtatcaacaataggtttatcgaagaaatgtcccaatacgaaggcgacatcccagattatccaatacaaaatgagctaacaagtagcataagaaaagccgcagcaaacatcggcgacaaagagttaacacatatgtggagtggacaaagcccgcgactagcaacaacgcatcccgccaacaccatcatgtccaatataatcaatcaaattaatcaaatcatgcaatataaataatcgaccgcaatccacaaaaccacaagcacccccaaacattattttagtgcttgccatttttgtggattgcgtttctattttaccaatctagtcaaacgaaaacatcaaactaaagttcgctgaaatgattatggtcaaacgaaattatcgagctaaagttcgctgaaatgattatgattaaacgaaatcatcaaactaaagttcgctgaaatgattatgattaaacgaaaacatcaaactaaagttcgctgaaatgattataattaaacgaaatcatcaagctaaagatcactgaaatgattatagtcaaacgaaattatcgagctgaagatcactgaaatgattatagtcaaacgaaatcatcgagctaaagttcgctgaaatgattatgatcaaacgaaaacatcaaactaaagttcgctgaaatgattatgataaaagttatatggtatgatgacattggtgatatatatgataaacatcggattaacaggttggggtgatcactattcattatatgaagatttagaacgccaaaccgataaacttaaaacatatgctggacattttccggttgtcgaattagatgcgacatactatgcgatacaaccggaaagaaatatattgaaatggataaaagaaacgcctgatacatttgaatttgtggtcaaaattcatcaagcactcacattgcatgcagactacaaaacatttgcagatacaaggcaagaactatttgaccaatttaagaatatgttagagcccttacaaacacagaaaaaattagcaatggtattggttcaatttcctccatggtttgactgcaatgcacaaaatatcaaatatattttgtatgtaagacagcaattacaagcatttccaatgtgtgtagaatttaggcatcaatcatggtttagtgatgcatttaaagaacaaacattggcatttttaacagaacatcaaatcattcatgcagtagttgatgaaccacaagtgaaagatggcagtgtacctttagtcaatcgaatcacaaatgaaattgcgtttgtacgttatcatggacgtaatcattacggttggactaagaaagatatgtcagatcaagaatggcgagatgtacgctatttatatgattataatgagcaagaattaatagacttggcacaaaaggcacaaatattagctcaaaaagctaagaaagtttacgtcatatttaacaataattctggtggtcatgcagcaaataatgccaaaacatatcagcgattattgaatatagaatatgaagggttagcaccacaacaattaaaattattttaagaggcgacgactatgttattaacaattacattattagttctaatcggtggtttgtcagcaatcatcggatcaatcgttggtattggaggcggcattataatcgttccgacattggtctatttaggtgttgaacatgggttattacataatattacaacgcaaatagcgattgggacatcgtctgtcattctaattgtgacaggactttcttcatcgcttggatatctaaaaacaaaacaagttgatattaaaaatggctctatctttttatttggattattaccaggttcattgcttgggtcattcattagtagatatttaacatttgagtcatttaatttatattttggaatctttttaatctttgtagctattttattaatggtaagaaataagattaaaccgtttaaaatatttgataaaccaaagtatgaaaaaacttatgtagacgctaaaggtaaaacatatcattatagtgtgccaccattgtttgcttttattacaacgtttttaattggtatattgacaggtttatttggtattggaggtggcgcactaatgacgccactaatgcttattgtatttagatttccacctcatgtagctgttggaacaagtatgatgatgattttcttttcaagtgtcatgagttctatagggcacattgctcaagggcacgtagcttggggttatgcaatcattttaattatttctagttattttggtgcgaaaatcggtgtcaaagtgaaccaatcaattaaatcagatacggtagtaacaatacttagaacggtaatgctattgatgggtatttatttaattattcgtgcactgatttaatacaactttaaaaggaggacgtcaatttgaggcttacaatttatcatacgaacgatattcatagtcatttacatgaatacgaacgcattaaagcatatatggcagaacaacggccacgacttaatcatccttctttgtatgttgatctaggtgatcatgtagatttatccgcacctataactgaagcaactttaggtaaaaagaatgtggcattactaaatgaagcaaaatgtgatgttgcaacaatcggtaataatgaagggatgaccatttcacacgaagctttaaatcacctttacgacgaagcaaaatttatagtgacatgtagcaatgttatagatgaatcaggtcatttaccaaataatatcgtttcttcttatattaaggatatagacggtgtgaaaatactattcgttgcagcgacagcaccttttaccccattttatcgtgcactagattggattgttaccgatccacttgaatctataaaagaagaaattgaacatcaacgaggtaaatttgatgtattaatcgtgctaagtcattgtggcattttcttcgatgaaacattatgccaagaattgcctgaaattgatgtcatttttggtagtcatacgcatcattattttgaacatggtgaaatcaataatggtgtactgatggcggcagctggaaagtatggtaattatcttggagaggttaatttaacttttgaggcacataaagtagtacataaaactgcaaagattattcctttagaaacattacctgaagttaaaacttcatttgaagaagaaggaaaaacgctaatgtccaatccagtaattcaacatccagtagtgcttaagcgtagtatgaaccacataactgaagctgcatacttattagctcaaagtgtttgtgagtatacacatgcacaatgtgccatcatcaatgctggcttactcgttaaagatattgtaaaagatgaagtgacagaatatgacattcatcaaatgttaccgcatccgattaatatggtaagggttagactttctggtgtgaaattaaaagagattatagctaaaagtaataaacaagagtatatgtatgaacatgcacaaggtttgggtttcagagggaatatatttggaggatatattctttataatttagggtacattcattctacagggcgttactatctgaatggagaagaaatcgaagacggcaaagaatatgtactaggtacgatagatatgtatacgttcggtcgttatttcccaacattgaaagaattaccaaaagagtatttaatgccagagtttttaagagatatatttaaagaaaaattattggaatattaaaaagtaagattattggattttcatttgtcatgaatttcgatataatgtttaaagatacacttaacaggagggtatgtgttgttatggcgacaaaaaacgaggaaatattacgtaaaccggattggttgaaaataaaattaaataccaacgaaaactatacaggacttaagaagatgatgagggaaaaaaatcttaatactgtatgtgaagaagctaaatgtcctaatatacatgaatgttggggtgcacgtcgtacagcgacatttatgattttaggtgccgtatgtacaagagcttgtcgtttttgtgcggttaagacaggtttacctaatgaacttgatttaaatgagcctgaacgtgtagctgaatcagttgaattaatgaacttgaaacacgttgttatcactgctgttgcgcgtgatgatttaagagatgctggttcaaatgtttatgctgagacagtacgtaaagtcagagaaagaaatccatttacaacgattgaaattttaccatcagatatgggcggggactatgatgcgttagaaacattaatggcttcaagacctgacattttaaaccataatattgaaactgttcgtcgattaacaccgagagttcgtgcgcgtgcgacttacgacagaacattagagtttttacgtcgttcaaaagaattacaaccggatatcccaactaaatcaagtattatggttggattaggtgaaactatagaagaaatttatgaaacgatggatgatttacgtgcgaatgatgtagatattttaacgattggtcaatatttacaaccttcacgtaaacatttaaaggttcaaaaatattacacgcctttagagtttggtaaattaagaaaagtggcaatggataaagggtttaaacattgccaagctggacctttagtacgtagttcttatcatgccgatgagcaagtaaatgaagctgctaaagaaaagcaacgccaaggtgaggcacagttaaatagttaatatttaaccattaataaggcataaaggcttagtttgtacaaaacgaacgtgtcatagaagtaatcattatttttatgaaacactaaaagtataaactgagcctttcattgtcatagataggtgaagaatttgataaaagtagatcaacattactttgaattaatagaaaattatcgcgaatgttttaatgaagaacaatttattgctaggtattcagatattttagataaatatgattacatagttggtgactatggttacgatcaattacgattaaaaggtttttacaaagattctaataaaaaagcagagatgagtaaacgtttttcaaatattcaagattacatatttgaatattgtaactttggttgtccttactttgtattaagacatttgtctaaacaagaggttaaaaagttaatcgaagaagttcatccgtctgatgtgatagatgacgacaaaaaacttcaagatgtgaagattaagccaaccattcaagatactgaacattaataaaacccttagctagattgaaaatgggaatcatgcaattcaagcatggacctgtaatctagttaggggtttttatctttaatgaatgacttcatttaaatactcagtaatttcatcgccttcttcagcatttacacctaaaatatgagcgatatagccttcttcttttaaatcatcagtaccgataataccgaatttatttgtttgcatattaagtacgagtgtcttaccataatgtctatttgtatggactaacattaaatcatatcgactatgctcgccaacaaaaccaacaaactgaacttgactctcttcgttgtcatcatataaatacatatcaatcattttgtagtgactccttttaaaagtagtaaagttagtataacgacaaatgaagtatactgcaaaattatgataatatataagcgagaggtgacaaggaatgtattttgtagacaaagataaactaactcagaaattagcctatttacaagcattaactgatgattaccatgagagtaagcacaatcattatgcatttgaacgcattgctcaaatgttgatagaatcatcggtagatatagggaatatgattatcgatgcatttattttaagggatcctggtaattataaagatgtgattgatatattagaactagaaaatgttattactaaagaaacacagcaggcgattaataaaactgtcgatattcgtaaacaatttacatatgattacacagccttagatattaaggttatcatgccaatgtttgatgacgcattaccttattacaaacaatttattacagaagtaacgacatttttacatcaagaaaatgtaccagtaacagcttttggtaaaggagaaaatcaataatgaaacagtataaagcgtatttaatcgatttagatggcacaatgtatatgggaacagatgagattgatggagcaaaacaattcatcgattatttaaatgtaaaaggcattcctcatttatacgtaactaataattcaacgaaaacacctgagcaagtaactgaaaaattacgtgaaatgcacattgatgctaaaccagaagaggttgtaacgtcagcgttagccactgctgattatatttcagaacaatcaccaggagcatcagtatatatgttaggtgggagtggtttaaatactgcgttaaccgaagcgggacttgtcattaaaaatgacgagcatgttgattatgtagttattggacttgacgaacaagttacatatgaaaagcttgcgattgcaacgttaggtgtaagaaatggagcaacatttatttctacaaatccagatgtgtcaattccaaaagagcgaggatttttaccagggaatggtgctattacaagtgttgtaagtgtatcgacaggtgtatcgccacaatttattggtaaaccagaaccgattattatggttaaagcattagaaattttaggattagataaatctgaagttgctatggtaggcgatttgtacgataccgatattatgtctggtattaacgtaggtatggatacgattcatgtacaaacaggtgtatctacgttagaagatgtgcaaaataaaaatgtgccaccaacgtattcttttaaagatttaaatgaagcaatagctgaattagaaaaatagatatagtcattttataaagtaggtgaattgatttggtaaaaatagttgtttcgaggaaaattccagataaactttatcaacaattaagtaaacttggtgacgttgttatgtggcaaaaatcattagtgcctatgcctaaagatcaatttgtgacagcacttcgtgacgcagatgcttgttttatcacattaagtgaacaaatcgatgcagaaattttagcacaatcaccaaatttaaaagtaattgcgaatatggctgtaggatatgacaacatcgatgttgaaagtgcaacagagaacaacgtgattgtcacgaatacaccaaatgtacttactgaaacaactgcagaattaggatttacattaatgcttgctatagcacgccgtattgtagaagctgaaaaatatgttgaagcagatgcatggcaaagctggggtccttatttattgtcaggtaaagatgtcttcaattcaactattggaatatatggtatgggagatattggtaaagcttttgcaagaaggttgcaagggtttaatactaatattctttatcataatcgatcaagacataaagatgcagaggcggactttaatgcaacatatgtttcttttgaaacgttgttagcagaaagtgattttatcatctgtacagcgccacttacaaaagaaacacatcataaatttaatgctgaagcatttgagcaaatgaaaaatgatgcaatttttattaatatcggtagagggcaaattgtagatgaaacagcattaatcgatgcactagacaataaagaaatattagcatgtggtttagatgtattagcaaatgaaccaattgatcatacacatccattaatgggacgtgataatgttctgattacaccacacattggtagcgcatcagtaacaacacgggacaatatgattcaattatgtattaaaaatatagaagcggttatgacaaatcaggtaccacatactccagtaaattgaaaataagtatggtttttaatcattggtaaagcaagcaaagcaattgtaaaatatgttatgcttgacttgcgaatgtatatatttgcgctgatgataattcaataacattataaactcgtcatattaatgtgatgagtttatttgattttgacgtatataacaaaattgttatatagactgtaattgtttattgtttaaataacctttaaaatgaatgatgttctcaacaaagtgtatcatttacaataattgagtgatgacaaccaattactatgttgaatctataaaattaaaattgaatttcattatgaatatcgatataatgaattgtaaaaaacaaattttaaaacgtattttatattgaacggtctttataaaggcgtttttactaagaactttaagaggtgcaatatgaaatctaaaagtaaacagccacctaataaatatgttgaagcattcaaaccatatttattaacactattgtatttggcaatatttattactttatatttaatttatggcagtggcgacacacacaataacttcatttataatgagttctaatgagggagacttaatatgacagatattattaacaagctgcaagcgtttgcggatgcaaatccacaaagcattgctgttagacacacaactgatgaattaacttatcaacagttaatggatgagtctagtaaattagcacatcgattacaaggtagtaagaaaccgatgattttattcggtcacatgtcaccatatatgattgttgggatgattggtgccattaaagcaggatgtggatatgtacctgtagacacttcaattcctgaagaccgtattaaaatgattattaacaaggttcaaccagagtttgtatttaatacgactgatgaatcatttgaaagtttagaaggcgaagtatttacaatagaagatattaaaacatctcaagacccagtaatttttgatagtcagattaaagataacgacacagtatacacaatctttacatctggttctactggggaacctaaaggtgttcaaattgaatatgcaagtttagttcaatttactgagtggatgttagaacttaataaatcaggaaatgaacaacaatggcttaaccaagcgccattttcatttgatttatctgtaatggctatttatccatgtttagcatcaggcggtacattaaatcttgtagataaaaacatgattaataaacctaaattattaaatgaaatgctaacagcaacaccgattaacatttgggtatcaacaccatcatttatggaaatgtgtttattattaccaacgcttaatgaagaacagtatggtagtcttaacgaattcttcttctgtggtgaaattctacctcacagagcagcaaaagcgttagtaagccgtttcccaagtgcgacgatttacaacacatatggtccaactgaagctacggtagcagttacaagtattcaaattacacaagaaatcttagatcaatatccgacattacctgttggcgttgaaagaccaggcgcaagattatctacgacagatgaaggtgaacttgttatcgaaggtcaaagtgtaagtttaggatacttaaaaaatgaccaaaaaacagctgaagtatttaatttcgatgacggtattcgtacttatcacactggtgataaagcgaagtttgaaaatggtcaatggttcattcaaggtcgtattgatttccaaatcaaattgaatggctacagaatggaattagaagaaattgaaacacaattacgccagtctgagttcgtaaaagaagcgattgttgtacctgtatataaaaatgataaagttattcatttaattggtgcaattgtgccaacgactgaagttacggacaatgcagaaatgactaaaaatattaaaaatgacttgaaatcacgcttaccagagtatatgattcctagaaagtttgaatggatggaacaattgccattaacttcaaatggtaaaattgacagaaagaaaattgcagaggtaattaacggatgattccatatggtgattttacattcttcttaattgctttaattgcattattaccagtcattatacttggatttttaggtaagcgaagttacatttataatggcgtagttacagcatttatgattgtgttaatcttttcttctgataaacataatctgtttgaccaaaagtatttaagtgttcaattaattagttttattatttacgtcgtatggcaagttttattgataatgttttattatcattcaaaaccaaaaaataattcattttcaaaatttgtaactgtaatggttttatcaatattgccattagcacttgtgaaagtattacaaagtacatggttaggtggacatcagattcacttccatgaaagtaaattaattgaatttgttggtttcttaggaatttcttatgttacattcaaaagtgtgcagttaattatggaaattcgtgatggttctatcaaagaaattaaagtatggaaattaattcaatttatttcattcttcccaacgatttcatctggaccaatcgatcgttacaaacgtttcgttaaagacgataaaaaagtaccaacaggcaatgaatatcgtgaattagtattaaaagcaattcacatgattatgcttggtttcttgtataaatatattgttgcttactttattaacacatatgcaattatgccgttacaattagacttacatggctttgtcaatttgtggttatatatgtacgcatacagcttatatttattctttgactttgcaggttatagtttatttgcgatagcatttagttatttattcggtattaaaacaccaccaaacttcgataaacctttcaaagcgaaaaatattaaagatttctggaatagatggcatatgacattatcattctggttcagagattgtatttatatgagatctttattctacatgtctcgtaaaaaattattgaagagtcaatttgcaatgtctaacgtggcattcttaatcaacttcttcataatgggaatttggcatggtatcgaagtgtattacattgtttatggtttataccatgcagcattgtttataggttatggctattatgaacgttggcgtaagaaacatccgccacgttggcaaaatggtttcacaacagcacttagcattgtgattacattccactttgtaacatttggctttttaatcttctcaggtaaacttatataataaaggagaatttaattatggaatttagagaacaagtattaaatttattagcagaagtagcagaaaatgatattgtaaaagaaaatccagacgtagaaatttttgaagaaggtattattgattctttccaaacagttggattattattagaaattcaaaataaacttgatatcgaagtatctattatggactttgatagagatgagtgggcaacaccaaataaaatcgttgaagcattagaagagttacgatgaaattaaaaccttttttacccattttaattagtggagcggtattcattgtctttctattattacctgctagttggtttacaggattagtaaatgaaaagactgtagaagataatagaacttcattgacagatcaagtactaaaaggcacactcattcaagataagttatacgaatcaaataagtattatcctatatacggctctagtgaattaggtaaagatgacccatttaatcctgcaattgcattaaacaagcataacgccaacaaaaaagcattcttattaggtgctggtggttctacagacttaattaacgcagttgaacttgcatcacagtatgataaattaaaaggtaagaaattaacatttattatttcaccacaatggtttacaaaccatggtttaacgaatcaaaactttgatgctcgtatgtctcaaactcaaattaatcaaatgttccagcagaaaaacatgtctactgaattaaaacgtcgttatgcacaacgtttattacagtttccacatgtacacaataaagaatacttgaaatcttatgctaaaaaccctaaagaaactaaagatagttatatttctggttttaaagagaatcaattgattaaaatagaagcgattaaatcattgtttgcaatggataaatctccattagaacatgttaaacctgctacaaaaccagacgcttcttgggatgagatgaaacaaaaagcagttgaaattggtaaagctgatactacatcgaataaatttggtattagagatcaatactggaaattaattcaagaaagtaagcgtaaagttagacgtgactacgaattcaatgttaattctccagaattccaagatttagaattacttgtaaaaacaatgcgtgctgctggtgcagatgttcaatatgtaagtattccatcaaacggtgtatggtatgaccacattggcatcgataaagaacgtcgtcaagcagtctataaaaaaatccattctactgttgtagataatggtggtaaaatttacgatatgactgataaagattatgaaaaatatgttatcagtgatgccgtacacatcggttggaaaggttgggtttatatggatgagcaaattgcgaaacatatgaaaggtgaaccacaacctgaagtagataaacctaaaaattaaaatacaaatagcacataactcaacgattttgattgagcgtatgtgctatttttatattttaaatttcatagaatagtaatatgcgcttggatatgtggctataataaaataatgaatcagataaatagtataaaataactttcccatcagtccaatttgacagcgaaaaaagacaggtaataactgattataaataattcagtattcctgtctttgttgttattcataatatgtgctgttaacttaatatctttatattagaatacttgttctacttctattacaccaggcacttcttcgtgtaatgcacgctcaataccagctttaagagtgattgtagaacttgggcatgtaccacatgcaccatgtaattgtaatttaacaataccgtcttctacgtcaatcaatgagcagtcgccaccatcacgtaataaaaatgggcgaagacgttcaataacttctgctacttgatcaaacatcgttgtatcttcagtaggcatcaggcaagtctcctttcgagagatgaatttgataatctttattagtatattataatagatagtgtaataaaaatctatcaaaccaatgggggataaatatatggagcacgtgagtgtggtagtatatggggcagatgttatatgtgcaagttgcgttaatgcgccaacatcgaaagatatttatgactggctacagccgctattaaaaagaaaatacccaaatatatcatttaaatatacgtatatagatattacaaaagataatgacaacttaacagatcatgatttacaatttattgaaagaatagaacaagatgagctattttacccattaattacaatgaacgatgaatatgtagcagatggttatatacaaacaaagcaaatcactcgatttatagaccaaaagcttgtgaatgaataatatacacataataaaaagcaatgtcagtaatagtgcgaactgacattgctttttaatttttaaccattatgatatttatataaccaaagtacgccggattttaaaatagaagcgagtcgtcctgttacagtgcgatccatgatatatgcaaaaccttgtttatctcctaatgacccaacgataccttgtacctttagttcgggcattttgtcaggtaatggttcatttagccattgctttttaagcacatcggcaatttgatcaccttgaacttcggctaactgagcacttggcgcatgtggtaaatcagcacaatcaccaactacatagacgttacgatatgttggtacttgatgatactggttaactatcacgcgtccattactatttatgtcaatcggcaagttacgaacaacttcaacaggttgaattcctgctgtccatacaactaaatcaatatctttaggttcatcacagttatatattttaccaggttcaactttattaatatttgaatttggaacaacggtaacattatttttggcgaaccatttcgcaacatacttacttaatttttctggaaaatttcttaaaattcgtggcccacggtcataaagatatatttccaagtctgatctactttctcttaattcgctggcaagttctatgccgcttaatccagcaccaacgataccaactttagcaccttctggtagttcactaatactatggaaagtatcccgagcctttgagagtgtttgaatactatgtgtatattcttcggctcctggaacgttatgatatttatcttcacatcctaaaccaatgattagctcatcataatcaattttagaattaccgactgagacaatttgagcatctaaatctatgtcgttaatttcaccataaaccgtattcacttgtggatgattagggaatttcatgcgaacatctttatctgatttcgtgcccgcagctaaagcataaaattctggtttcaatccatgaaatggcatacgatcaactaatgtgactgtataatcttgtggtaaagatgtagttaaaatgcgtgacatgatacgcatattaccatatccaccgcctaacaaaactaagtttttcataatgaagtaccccttttatatgttaatatttactttaattttgaaaagatcaaagtgcatagatatatttgttaatgaacagttataaaatgcaagtgtctttgattcatcaataacccctaaaaaagtaaatatgtatttatatgcttattatatatttttttgaaaatgactacaaataaatatttgtactaactaaggcactattgcataactgggataagaaacatcagttgttgctaattgagcacatcatgttaaaataccagttttaaaatgctataatattgtaacaaatgaaataagaaggtgaagtatgaatccgatcgtagaattttgtctctctaacatggcaaaaggtggagattatgtttttaatcaactggaaaatgacccagatgtcgatgtgttagagtatggttgcctgacacattgtggtatatgttcagccgggttgtatgctttagtaaatggtgatattgttgaaggtgattcgccggaagaattattacaaaatatatatgcacatataaaagaaacttggattttttaaggaggagttatcatgccaacagttatattaacagaagcagctgcctacgaagtaaaagatatgcttaaagcaaatgaaatgccagatggctatttaaaaattaaagtgaatggtggcgggtgcactggtttaacatacggtatgggtgcagaagaagcgcctggtgaaaatgatgaagtcttagaatactttggattaaaagttttagtagacaaaaaagatgcacccgtattaaatggtacgactattgattttaagcaatcattaatgggtggcggtttccaaatcgacaatcctaatgcaattgcatcatgtggctgtggtagttcatttagaactgcaaaagttgcaggtaatcctgaaaactgctaataaaataactttttaatgattaacccaattttggggatacaaattgatatcaatttcgattagggacatatttgattatgtcctatttttgcgtaaagatattttgttttattaaaaagcttattgaaaattaagaatctgactattaatagtattttaaatgatcgtgataacggatacatttttaatcgaaatcaggctacgaaaaaattaattaattttttcacaatctgactgaatcttgcttgaaaatataacataaaagctatagaattagtattggattaaaaatgtcttttttgtgaacatcacaggtttttacataatttaaaagacttaaataacaaaatgatgataaactagtatacattgtggtaaaagtagtaatgaccagttgttactagtaattatcagcatttggttaaaaaaatatgaaagcttaggtgaaattaaatggctcaagatcgtaaaaaagtacttgtacttggtgctggttatgcaggtttacaaactgtaactaaattgcaaaaagcgatatcaacagaagaagcagaaattacgcttattaataaaaatgaatatcactatgaagcaacatggttacatgaagcatcagcaggtacactaaactatgaagatgtattatatcctgtggaaagtgtcttgaagaaagacaaagtgaactttgttcaagcagaagtaacaaaaattgaccgtgatgctaaaaaggtagaaacaaatcaaggcatttatgactttgatattttagtagtagcattaggtttcgttagtgaaacattcggcatcgaaggtatgaaagatcatgctttccaaattgaaaatgttatcacagcacgtgaattatcacgtcatatcgaagacaaatttgctaactatgcagcatcaaaagaaaaagatgataacgatttatctatcttagttggtggtgctggattcactggtgttgaattcttaggtgaattaacagacagaattcctgaattatgtagcaaatatggtgtggatcaaaataaagttaaaatcacttgtgttgaagcagcacctaaaatgttaccaatgttctcagaagaattagttaaccacgcagttagctacttagaagaccgcggtgttgaatttaaaattgctacaccaatcgttgcttgtaacgaaaaaggtttcgtagttgaagtagatggtgaaaaacaacaattaaatgcaggtacttcagtatgggcagctggtgtacgtggtagtaaattaatggaagaatcatttgaaggcgttaaacgtggacgtatcgttacaaagcaagatttaacaattaatggttacgacaacatttttgttattggtgactgttcagcgtttatcccagctggagaagaacgtccattaccaactacagcacaaattgcaatgcaacaaggtgaaagtgttgctaaaaacattaaacgcatcttaaacggtgaatcaactgaagaattcgaatacgttgatcgtggaactgtttgttctttaggttcacatgacggtgtaggtatggtatttggtaaacctatcgctggtaaaaaagcagcattcatgaaaaaagtgattgatacacgtgcggtattcaaaatcggtggtatcggtttagcattcaaaaaaggtaaattctaggctttaaattaagttacagctaaacacataaaattaaattattcatttataaagtccttcagtgtcactgaagggctttattgttgtacaatttgaagtgagtaacatatcaaatctaaggaggtacattatgaattttaaattaaataacacactaagcaacgaaataaatacattgattattggtataccagaacatttaaatcagttagagcgcattagttttaatcatatcgatattacagaatcacttgaaagactaaaacatcaacatattattggtagtaaagttgggaagatttatacaactgcatttgatgtacaagatcaaacatatcgtttaattacagttggtttaggaaacttaaaaacacgtagttatcaagatatgttgaaaatatggggacatcttttccaatacataaagtcagaacacattgaagatacgtatttacttatggattcatttatttcaaaatatgatcagttatcagatgtattaatggcatgcggcattcaaagtgagcgtgcaacatatgaattcgatcattataaatcaagtaagaaggcaccgtttaagacgaatttaaaccttattagtgaatcattaattgaattagatttcattcatgagggtatcagtattggccaatccattaatttggcaagagactttagtaatatgccaccgaatgtattaacaccacaaacatttgcagaagatattgttaatcattttaaaaatacaaaggtcaaagtagaggttaaagattatgacactttagtttctgaaggatttggacttttacaagcggtaggtaaaggtagtaagcataaaccgagattagtaaccatcacatataatggcaaagataaagatgaagcaccaattgccttagttggtaaaggtataacgtatgattctggtggttatagtattaaaacgaagaatggcatggctacaatgaaatatgacatgtgtggcgctgcgaatgtcgttggcatcattgaagcggctagtcgtttacaactgcctgtaaatattgtcggagtgcttgcttgtgctgaaaatatgataaatgaagcatcaatgaagccagatgatgtatttacagcattaagtggtgaaactgtagaagtaatgaatacagacgctgaaggtagattagtccttgcagatgctgtgtattatgcaaatcaatatcagcctagtgtgattatggactttgctacattaacgggtgcagcaattgttgcactaggagatgataaagctgctgcatttgaatcgaatagtaaagtgatattaaacgatatattacaaataagttctaaagtcgatgaaatggtatttgaattaccgattactgccaccgaacgtgcaagtattaaacacagtgatatcgctgatttagttaaccatacgaatggacaaggtaaagcgctatttgcggcaagttttgtaacacattttagtggtcaaacacctcacattcatttcgatattgcaggtccagcaacgactaataaagcttcatataatggtccaaaagggccaacaggatttatgattccgacgatagtccaatggttaaaacaacaataatttaattatttgcctgatacaacttgtgtcttgttatacatttctaatttaactcttgaaagtataaaggatcgcattgtagcaggcattttcattattgtaagaaaatataaatcgcatatccttgtgagcataaatcaacttgaatagcattgcaaaaaatattataagcatatgttcattcagtcaacgactactaatataacattatagaacttaggattttgattggtgttccaggcttgtaaaattgtttgatttaatgaaagcgaaaattattttaagaaagacaattaactaaaaaataaagattattagtatagtttgctattgacaggtgttaaagctactgatactatgtagtctataaacgctttagttcgatagagtgataaaggatggttgtcatatgataaatgcagtagtaatagcagtaatattaatgattgtgctatgtttatgtcgattaaacgtagttataagcttatttatcagtgcgctagttggtggcttaatttcaggcatgagcattgaaaaagttataaatgtatttgggaaaaatatagtcgatggtgctgaggtagcattaagctatgccttattaggtggatttgcagcattaatttcatacagtggtatcacagactatttagtaggaaaaattataaatgcaattcacgctgaaaatagtcgatggtcaagagttaaagtaaaagtgacaataattattgcattattagctatgagtatcatgagtcaaaacttaattcctgtacatattgcattcattccaattgtcatcccaccattgttaagtctgtttaatgatttaaaaatagatagacgtttaatcggtttgattatcggttttggtttatgtttcccgtatgtattattaccttatggattcggtcaaattttccaacaaattattcaaagtggctttgcaaaggcgaatcacccaattgagtttaatatgatttggaaagcaatgcttattccttcaatggggtatattgttggcttacttatcggcttatatgtatatcgtaaaccacgtgaatatgaaacacgtaaaatttcagatagtgacaatgttacagagttaaaaccatatatcttaatagtaacaattgtagcaatactagctacatttttagtacaaacatttacagattcaatgatttttggtgcactggccggagtactcgtattctttatttcacgtgcatataattggtatgaattagatgctaagtttattgaaggtattaaaattatggcttatattggtgtagttattttaacagcaaatggatttgctggtgtaatgaatgctactggtgatatagatgaattagttaaaactttaacaagtattactggtgataataaattatttagcattatcatgatgtatgtgataggtttaattgtcactttaggtattggatcatcatttgcaacaattcctattatcgcatcattattcattccttttggagcgtcaattggactagatacaatggcattaatcgcattgattggaacagcgagtgcattaggtgactcaggttcacctgcaagtgattcaacattaggaccaactgcgggattaaatgttgatggccaacatgatcatatacgcgatacatgtgtaccaaacttcctgttttataatattcctttaatgattttcggtactattgctgctatggtactataagcataaagaggtgaaaatatgactcatttattagagacatttgagatgtcaatagatcaccaggaagatggtttagttgttatttctatgcctgttactgataaagtaaaacaaccatttggatatttacatggtggtgcttcgattgctttaggtgaaacagcatgttcattaggatctgctaatctaattgatacaaccaaatttattccattaggtttagagatgaatgccaaccatattcattctgctaaagatggtcgtgttactgcgacagctgaaattattcatcaaggtaagtcgacacatgtatgggatataaaaattaagaatgacaaagaacaattaattacagttatgcgtggtacagttgctattaaacctttaaaataaaagaactgctagctgaaatgttatgagatattcataactacggctagcagttttttttatgcgctatattgctgtagttttagaaatgcttgttcaatgcgttcggcagctttacggccacccataacatttctaccaaatggtcctaattctaagtctgcaaagcatcctgcgacaaatagatttggtatccattctaatttttcggaaataacagggtaattacattcgttgataggtgcatcataattttgtattaattgcttaataagtggttgtgacataaaatcttgttcaaaaccagttgcaaccataatctgttgatatggaacagaatcattttcagtgttaattaaaccatcactaatttgagtgataggtgttttatgcacatttatacgaccatttttaatatgttttttaaggcgtaagtacagttcgtgaggcattgatcctttatgacgttcacgttgtacaatggcatttctttcacgcatgcttttagtacttaaaaatgaagacatatttttcggacctaaccaaccagggtcagcatcaaagtcatgtatttcaatatctttatttagccataaatgaatctttttatcgtcatcatgatttaacaatttaagtgcaagatgtgcagcagtaatgccactaccaacgatatgatcggtcttatcatatactacttgatcatgttctttctcgaagatatgatttacattctgtttgtcttttaaaatgtcaggcataaacggaatatttgtactacctattgcaataacgacgcaatctgtagtgataatttgtccatcttctaacttgatatgccatttgtctccttgtttatctaaagtttgaactaaaccttgaactaagcaatcctctaattgatattgtttagaagcatgtgcaatatgatccataaacattgtcaattcaggtcgctgataaggaccataaaaagcatttgtatattggtgctgtttagcgaattgttttagatggaacggttgtggatgtacgtgatgtacaatcggtgatctcaaataaggcatttctattcgatttgtatatgagttaaacctttggcaaaaagtttcgtgtgggtcaatgattgttaatcggtctgttgttaatccgcttgataatagtttttgtgcgattgcagttccctgtatgccaccgccgataattgtccaatgcataataaaacctctctctttttttaaagcgtaatcgttacgatttataattattattatcataatacataacgacatgaaaggcaattaaattaaagagatatacgtggattgggcgaagctgtagtcaaagaagtatgtactaaactaaattcattgaaaaagaggtaacaatgtcaaaagaaaacagcagtaaaatcattcctaatttggaatcatcttactgctgtttgttgttgatttatattcatgactttgttatataatctataattttgtgtcttttaagtcttccgaaatttcatcgactttagtctttttagtataaggcgttttaatattatatgctgctttcataatcatatgacttgaaagaggacctgtaattaatacaaagataatcgcaacgattaattgcatatttacaaaaccttgagtagcaataaaatataaaaacgtaccaaatagtaatgacattgcacctaatgttgatgcttttccggcagcatgtgcacgtgaatatacatcttcaagtctcaataatcctatggctgctagggcgctaattaaagcaccgatgataacaaagataagtgcaagactaatcagtatgattttgatcatgttcaatcaccttacctttgtccataaatttagagaatactgcagtacctaaaaaggctaatataccaatcatcataataacgacaatcatgtatttaatatttaataaaatactgaataatgctataactgccattaattgaagaccaatcgcatctaatgcgacaacacgatcggcaagtgatgggcctagtacaacgcgaatgagcatagctaacatagaaatgacaactatgattaatgcaataacgataataacattatgattcattatatttcgcccacctctcttacaattttctctaatgatgttttaatactttctacttcttgctctttagttgaaaaatctatggcatgaatataaatttttgtacgatcatcacttacaccaagcactacagtaccaggtgttaatgtaattaaattagacaacaagacaatttgccaatctttttttaaatctgtgtggtaaacaaagaatcccggttcatttttaatcgaaggtttaataataattttcaaaacatcaaaattagctttaatcagttcgattaagaaaataataactaatttaacaatacgatatagcgtgatgacataaaacctacctggtaacactctgtgtaagaggtaaacaagaactaggccaaagatgaaacctaacacaaagttatttgttgtgtaactatttgtcacaaacaaccaaaacactgcgataataaagtttaatactaattgtacagccatgttatttacctcctaatacagctttaacgtaggttgatggattgtagaatgtctctgcaccagcttttaccattggatataagtaatctgctgacaatccatataaaacagttatcacaactgcaacgattgcaatcgtagttaaatatttgacgtcgactttgttattaagatcatatccttttggttgaccgaaaaagccttgtaggaatatgcgaatgacagaatataatacgactaaacttgataataagacgatgacaccacttaaataaaatcctctttcaaatgttgattggacaatgaaaaattttccataaaagccactgagtgggggaatgccagctaaacttaatgctgcgataaagaatgaccaaccaagtacaggatatcgtttaattaagccaccaaattgtcttaaatcagcagtgcctgtaattttaatcataattccgataagcaagaataatgcaagttttactaacatgtcgtgcaatgtatagtaaatagcaccaatcatacctgactctgtcatcattgcaacgccgactaagatcacacctacagcaatcatgacattgtataggatgatttttttaatgttggcatatgcaacagcaccgacacaaccaaagatgatcgttaatagtgctaagaataaaatgacataatgtgaaaagcttacattatcactaaagaataagctcaatgttctagcgattgcataaacaccaacttttgttaacaaagcaccaaagaatgcaatgattggaattggtggtgcatagtatgcactaggtaaccaaacaaacattggaaatacgccagcttttgtagcaaaaacaaagataaatagtatgaaaacgatattgactaagccactgtcatgcgctgaaaggttagctaatttattgcttatatctgctagattcaatgttcctactactgaatataaaatcgctacacccattacgaagaaggatgatgatacaacgttaacaagaacatattttattgtttcttgtagttgaatttttgtagaaccaattactaataagaaatatgatgacattagaaatacttcgaaaaatacgaataggttgaaaatgtcaccagttgtaaaggcaccaatgatacctattaacataaatagtactgaaaaataataataatatctttcacgttcaataccaattgtttggtatgaatataaaatcacaatagctgtaataataatactagtaataattagtagggcactgaatatgtctaaaacaaagacaatactgtaaggcgctttccatgaacctagttcaactcgtaatggtccatgttttacaacatttgctaaattgataattgccgcgaccaaggttaataatgtaccgcctagtgcgacataacgctttataataggacgttttccaataaagacaagtaatatggctgtaattactggaatgacgagcgttaacacaagcatattactttcaatcatcttctggaactcctttcatactctcaacgttatctgtgcctaattctttatatgttctaaatgctaatactaagaaaaaggctgttgtcgcaaaggcgataacgattgctgttaaaataagtgcttgcgggataggatcaacatagctttttacgttcgcttcataaattggaacagtaccatgtttaagtccacccatagttattaaaaataaatttgctgcatgtgttagtagtgtagttcccataacaattcgtatcagacttttagacaaaacgagatagacactaattgctgtgagaataccactaacaaaaatcataataatttccactattcgttctctccaatcgaaataataattgtcatgacagtaccaactactgcacataaaacaccgaaatcaaagaatactgctgttgtcatatgaacaggttctaatataaataacggtatatcaaatgtgacatgcgtaaagaaatttttacctaaaaaccaacttgcgataggcgtcgcaatacaaaaaactaatccgatacctatcaagattttaaaatctaatgggaaaattttacgcattgtttctatatcaaatgcaatcgtaatgataacaagtgaacttgcgaataataatccgccgacgaaaccgccaccaggtgtataatgtcctgctaagaaaagtgaaaaaccaaagaccattaccatgaaaaagataataactgcagcaaattgcaaaattagatcattttgttgtctattcatgatttttcacctcgttaccttgcgtttgacgctttttacgtaatttaatcattgtatatacagctaatcctgcgataccaagcacagatgactcgaataaagtatccataccacggaaatcaacaagtatgacgtttaccatgtttttaccgtgagctaaatcataaacgtgctcttgataaaacttagatatcgattcaaaatgtctatttccgtatgcaattaaaccgataataatgacggacaaaccaacaccaccagcaattaaagcattagtaagctggaatgagcgcttttcattataacgatttaaatttggtaagtggtagaagcataataagaacaatgctgttgaaatagattcaacgacaaactgtgtcaatgctaagtcgggtgctttaaagaatataaacaatacagacacagcatatccaactgcacttaacataatgatgctaaataatcttgatttagcgaaaagaattaaaaaggcagcacttaataataaaattacgatacaaacttcgaaaattctaatcggactaacgtctttaaaattaatgttgaaaggtactgagaatacagtgacaaatgttaataaaattaatgcaccaaaaatgataactaaattattacgtgaataatcggtaacatagctattcgtcatcttttcagagtagtttggaataacatttgcacttctgttgtaccaataattgaatgttagtttaccaggttgtcgttgcaacaatttcacccaataactaaatgtcacaattagtaagatacctaaaatataaatcactaatgttgataaaaaggcaggcgttaatccatggaacatatggaattcaacatcatcaattaccgtatgattaatcgaagatgtagctggttcaataatcgaattagttaaaatgccagggaataaaccaaatacaattactaatgtagctaaaatagctggtgataaaagcattaatattgatacttcgtgtgcttttttaggtaattgttcaggtttatattgtccgaaaaatatatgcattataaatttaattgaatatacaaatgtgaagacactgcccactataccaatgattgggaataggtagcctaatgtatcaacactgaataaatttgcttggcttgctgtaaatgttgtttctaaaaatgattcttttgataagaaaccattgaacggtggtacaccagccatacttaatgctgtaataacagtgattgtaaatgaaataggcataattgttagtaagccacctaatttcttaacatcacgtgtaccagtagaatgatccactgcacctgtaatcataaatagggcacctttaaatgttgcatggttaattaaatggaatattgcagccgtaaatgcagcagcatatattttgctatcatcgccttgatagtgataactaatggcaccgattccaagcatcgccataatcatacctaattgggatactgttgaaaatgccagtatacctttcaagtcttgttgttttgttgcgtttagcgaagcccagaataacgtaattaaaccaacgagtgtgacagtccatatccaaccttgcgatgctgcgaagattggtgtcattcgagcgattaaatataaacctgctttaaccattgttgctgaatgaagataagcactgactggtgtaggtgcttccattgcatctggtagccaaatataaaatggaaactgagcagattttgtaaaagcaccaatcatgattaaaatcatcgcaaaaatgaagaatgggctattttgaatttcagaagcatgttgaatcatgtactgaatgctaaatgattgcgttggtatagcgagtaagatgataccacctaataatgatagaccaccaaatactgtgattatgagcgatttttgagcaccatgtatagatgcttgtcgttcgcgccagaatgaaataagtaaaaaactagaaaatgacgttagctcccagaataaatatagaataataacattatctgaaagtacgacacctaacattgcacccataaatagtaataaataacaataaaaattccctagttgttctgacttacttaagtagccgattgaatataatactactaaactgccgattcctgaaataagcaaactaaagagtaaacctaagccatcaagatataaatcaaagttcataccaaaatgaggcatccaatttaaggttttcattacagtattacctgacatcgtcgttttaattaatgtaagcatataaataaatatgacgatagggacaggtaatacgaaccatcctaaatgtatacgtttaaaaaatctatacaggataggaataatgagtgcgaatattaacggtaatatcaccgcaatatgtaacaaactcactatgttgtcctcctttaaaaaatatttatgttattcattatacatgaatgatatagttctgaaaaacgtacacactccttgttgtgctttattttcagaagtatttaaataagaagaaacacgtcattttttatttaaaattttctttgtattgaagtgaataatcttcttttaagcgtgctaaactagctaaagacatttcagcatgttttgtttgctgagctttaagtttagtttctaaatctgtaattgcttgttgaagtgaatcttcatagcgcaatacatcaacattgaagtcgcgtaattgtgaacgtttcgtatagcgtttttcaaaatgacttaatgctttgcgttcatggaaaaatacaccttcagtttcagtagggttatgtaaatcaccttgtttcgggtgtttgataacttgttcaactttaacaagtacatcgtctccattttcttcaacaatcgtgacaccatagctacctgttttgtgtgaaaatcgatatagcttcatgctattttcctcccttaaaagtatgttaatatatatgtatcataacatgaatggagaatataaatggctaactatccacagttaaacaaagaagtacaacaaggtgaaattaaagtggttatgcacacaaataaaggtgacatgacattcaaattatttccaaatattgcaccaaaaacagttgaaaattttgtgacacatgcaaaaaatggttattatgatggaataacattccaccgtgtcattaatgacttcatgattcaaggtggcgatccaacagctactggtatgggtggcgaaagtatttatggcggtgcttttgaagatgaattttcattaaatgcatttaacttatatggcgcattatcaatggctaactcaggacctaatactaatggttcacaatttttcattgttcaaatgaaagaagtacctcaaaatatgttaagtcaacttgcagatggtggttggcctcaaccaatcgttgatgcatatggcgagaagggtggcacaccatggttagatcaaaaacatacagtattcggtcaaatcattgatggtgaaactacattagaagatattgcaaatacaaaagtgggaccacaagataaaccacttcatgatgttgtaattgaatctattgatgttgaagaataatatctaaacataattaactaccaacattttaaactcggataaagctaatttatgaatggattagtatatattccaacgaaaacaaataaactaacatgatgagcaatctcaatatatttatcaagaaagcacagtttttaaatagatgtgtattctaaagataatagttgaggttgctttttatgtttttacagagaattgctattcaaatagttaataaattgaaaacaaagtagctggatatcatatttatttagataggaatttgttgctgattttatttgtaaatccaagtttgtagtattcttattcatttataaaataatattcgtatgatttgatgttttaattagtccaccatttcgatttgtgctatgataatagtgttaagtaaacgaaataaggggttattaagttgaataactacaaaattggccaacatatcaaggtgcgtgtaactggtattcaaccatacggtgcgtttgttgagacccctaatcatactgaaggactgattcatatatcagaaattatggatgactacgttcataatttgaagaaatttctatcagaaggccaaattgttaaagctaaaattttgtctatagatgatgaaggaaagcttaatctatcattaaaggataatgattacttcaaaaattatgagcgtaagaaggaaaaacaatcagtattagatgaaatcagagaaacagaaaaatatgggtttcaaacacttaaagaacgcttaccaatctggataaaacagtcaaagcgagcaattcgaaacgactaaaggaacagataaatcgtaccgaaaatcatacaaagggtctgaaatgaaagtttcttagactataaaagagattagtatctattaaattttattagatactaatctctttttgtctacgataacgtaatatgattgattctatttacacttacaaatggtttaaggtgacatatccattatatttgttagatagaatcgttgacttgcaataatgtatgtggatttgttttttaatttattttagaaatgagaactacaacttaaagtattaaacgaattgcaactatataaacagataattggagaatgaaaaaattacatgttatagtcaactcaataattttaaggaggaattaagtaatgaaaagtaaatacgaaccattgtttgataaagtagaattaccaaatggagtagagttgagaaatcgatttgtgttagcccctttaacacatatttcttcaaatgatgatggtactatttcagatatagaacttccttatattgaaaagcgttcacaagatgttggtattacaattaatgctgcgagtaatgtgagtgatgtcggaaaagcatttccaggacagccatcaatcgcgcatgacagtgatattgaaggactaaaacgattagctacagcaatgaagaaaaacgatgccaaagcactcgtacaaatacatcatggcggtgcacaagcattgcctgaattaacacctgatggagacgtcgtagcaccaagtccaatttctttaaaaagtttcggtcagaaacaagaacatagtgctagagaaatgacgaatgaagagattaaacaagcaatcaaggattttggtgaagcaacgcgacgtgcaattgaagcagggtttgatggtgttgaaatacatggcgcgaatcattacttaattcatcaatttgtatcaccatactataatagaagaaatgatgtttgggcaaatcaatataaattcccggtcgctgtgattgaagaggtgcttaaagcgaaagaagcgtatggcaataaagactttatagttggatacagattatctccagaggaagcggagtctccaggaatcacaatggaaattacagaggaactcgttaataaaattagccatatgccaatcgactatattcatgtttcaatgatggatacgcatgcaacgacacgtgaaggtaaatacgctggacaagaaagactgcctttaattcacaaatggataaatggtcgtatgccacttatcggtattggttcaattttcacagctgacgaagctttagatgcagttgaaaatgttggtgttgacttagtagccattggtagagagctactactggattatcaatttgttgaaaaaattaaagatggacgggaagatgaaattattaattactttgatccagagagagaagataatcatcacttaactcctaatttatggcatcaatttaatgaagggttctatccattaccacgtaaagataaataagtgtttaactgttaccactaatgatattgtgtatgcaatttgttagtggttttcaatatttataaataaaaatattcttagtaaaatatacttttgattaagtgtaaaattatcaattcttttgcttgtaatcatttaagtaattatgtcattataaatgtaagggttttcaaaatagacaaatttaatgaaacttagtgattatttcatcttttttggtggaaaagtatctgctttgaaaactaatgtaattatttggataatgtttcatgtataatagttataaatgatgaaaaggggagatatgatgactaaatctgaaaaaattattgagttaacaaatcattacggagcacataattatttaccattgccaattgtcatttcagaagctgaaggggtatgggttaaagatcctgaaggcaataaatatatggatatgttatctgcatattccgctgttaaccaaggtcatagacatccgaaaattattcaagcattaaaagatcaagctgataaagtgactctagtttcacgtgcttttcatagtgacaacttaggagaatggtacgaaaaaatttgtaaactggcaggtaaagataaagctttaccaatgaatacaggtgctgaagcagtagaaacagctttgaaagcagcacgacgctgggcatacgatgttaaaggaattgagccaaataaagcagaaatcattgcatttaatggtaacttccatggtcgaacaatggcgccagtttcattatcatcagaagcagaataccaacgtggttatggtccattattagatggatttagaaaagttgattttggagatgtagatgcattgaaagctgcaattaatgaaaatactgcagcagttttagtagaaccaattcaaggtgaagcgggtataaatataccaccagaaggatatttgaaagcaattagagaattatgtgatgaacataatgtcttatttattgctgacgaaatccaagcaggattaggtcgttcgggtaaattatttgctacggattgggataatgtaaaacctgatgtctatattttaggtaaagcactaggtggtggtgtcttcccaatttctgttgtattagcagataaagaagtattagatgtctttacacctggctcacatggttcaacatttggtggtaatccacttgcttgtgctgcatcaattgctgcattagatgttatcgttgatgaggatttaccagggcgctctttagaattaggagattattttaaagaacaattaaagcaaattgatcatccatcaattaaagaagtccgtggacgtggtttgtttataggtgtggaacttaatgaaagtgctagaccatattgtgaagctttgaaagaagaaggcttattatgtaaagaaacgcatgatactgtcattcgttttgcaccaccattaattattactaaagaagaattggaccttgcacttgaaaaaataagacatgtatttcaataatgtcaaaaagttgtaacaatcagtttgtaagggctttaaaaaggaatacgttatgttacaatatgtttgaaagcgaaatcattaggtaaagaagaggcgaaaaggatcatgactgagaacaataatttagtaacttctactcaaggaattattaaagaagcattgcataaattgggatttgacgaaggaatgtacgatttaattaaagaacctttaagaatgttacaagtgcgtatccctgtacgaatggatgatggcactgttaaaacattcacaggttaccgtgcgcaacataatgatgctgttggaccaacaaaagggggcgtgcgtttccacccagatgttgatgaagaagaagtaaaagcattatcaatgtggatgactttgaaatgtggcattgttaacttaccatacggtggtggtaagggtggtatcgtttgtgatccacgtcaaatgagcattcatgaagttgaacgtttatcacgcggatatgtaagagcaatttcacaattcgtaggtccgaacaaagatattccagcaccagatgtatttacaaactcacaaattatggcttggatgatggatgaatatagtgcattagataaatttaattcaccaggtttcatcacaggtaaaccaattgtattgggtggttctcatggacgcgacagatcaactgcactaggtgtagttattgcaattgaacaagctgcaaaacgtcgtaatatgcaaattgaaggtgccaaggttgttattcaaggtttcggtaatgccggaagtttcttagctaaattcttatatgatttaggtgcaaaaattgtaggtatctctgatgcttacggtgcattacacgatccaaatggcttagatatagattatttattagaccgtcgtgatagttttggtacggtaacaaatttatttgaagaaacaatctcaaataaagaattgtttgaattagattgtgacatcttagtaccagcggctatttcaaaccaaattacagaagacaatgcacatgatattaaagctagcatcgttgttgaagctgctaatggacctacaacaccagaagcaacacgtattttaactgaacgtggtatattattagttcctgacgtattagcaagtgctggtggtgtaacggtttcttacttcgaatgggtacaaaataatcaaggttattattggtctgaagaagaagttaatgaaaagctacgtgaaaaattagaagcggcatttgatacgatttacgaattgtctcaaaatcgaaaaatagatatgagacttgcagcatatatcataggtattaaacgtacagcagaagcagctagatatcgtggttgggcataattaattatcatatgttatttaacgagcttgggacagaaaacaaagccctaagctcgttaattatattttagcagtagttgactgaataaaaatacacttgtaacaagcttatttcaaaaatagccggggccccaacacagagaaattggcttcccaatttctacaggcaatgcaagttggcggggccccaacacagagaaattggggagtcaatttctacagacaatgcaagttggggtgggccccaacacagagaatttttaattaaacgctcaactatatatagttgatcaaaaagacagcagtaggataatttcattttagaaatatcttactgctgtcttttttagtaatagctatatttttgtatttatgttttctagtttaacaatactacttaatgacttctttatatttgtcagcgaaatttgtaaagacaccatcaacgccgtatttatttaatcgtaacatatcagctttttcatttactgtataaggatgtactataaatcctaagtcttttaaatgatgggtattttgttcagttaaatctgtataatcaggacctaatccaatcgcataagagcgtatctcttttaagcgttggtcgttaaattgttgtagttcacctttatcaactaattttactaatggcacatgcttattttgacgatgaattttctttaaactttcgtcagaaaatgattgaatcattacatgtccattttttaatttattgttatttaaaaggtgatgctttttcaacgaagctaataattgttcttccattcctgggtatacatcaggtgactttgtttcaatataatagtttgcattcggaccataacgttctaaaatttcatctaaagtgggtactttagcatttttataacttgctcttgcgtattttggatattttttattaaaccaacttcctgcatctaactgttttaattcatcaagtgtataatcctcaactctaccgtgtccatttgttgtacggttaacagtttcatcatgcatagcaactaaatggccatctttggtacgttgtaaatcaatttcgatataagatgcttttaactcattatgactcttatcatatgcttgaaacgtatgctcgggtgcatagccacttgcaccacgatgtgcgatagtagtgaatcgctcattcgttaaatttgtatgccattgaatagcctgaggtttatttgcaatttgatttgtttgttcagcgccagcagtaggtactgataaaaatcccatagtaaaaacagcagaagcagccataaatttagtgaagcttttcgaagagttagtcatagtctttatcctttcatctctttatttgtagtttaacaattttaaaatactacaaaaacctgcttgtgaaaacgctttacacatttcttttacaatttataacatttttgtaatataaatttaaaagaattatcaaacattttaggaatcttaaaaatgtgatgttcaacaagacgaagagagcattaaaatacccacaatgtaatttacatagacattgtgggtaggtagattaacgtatttattgtgatagtaattgtttagcaacatcaagttgttgtttgaccgatgattgacccgttgaaccgtaactttgacgtcgttttaagcaattttccggctgcaaataatcgtaaatatcggcatcaatactagaatgatgttgttgatatgttgctaaaggtacatctaataaataatgaccttgttgtatacattctaagacgatttttcctacaatttcatgtgcagttctaaatggaatatttttagttactaaataatctgctagttccgttgcatttgaaaaatcttctttaacagtttgattgagtcgttctttattaattgtcatcgtttgaatcataccttcgaaaatacgtaaagaacctttaattgtatggacagcatcgaataaaccttctttatcttcctgcatatctttgttatatgctagaggtaatccttttaaagtcataagcatgctcattaaatgaccagtcgttcgaccaactttacctctaattaattctgccatatcaggatttttcttttgtggcataatagatgagccagtagaaaatgcatctgataatgtaatgaatttagcttcgtctgtggaccagaaaataatttcctctgcaaagcgtgataagtgaaccatcgttaaagaaatattatgcaatgtttcaataatatagtctctgtcactaacagcatctaggctattctcatagagactgccaaagttcaacaatgctgttgtctcgtgtctatcgatagggtatgtggtaccacttaaggctgctgcacctaaaggattaatatcgattcgttttaaactatcttcaaatcgttgttggtctcgttgtaacatccaaaaataagtcataatatgatgtgcaaatgaaattggctgtgcacgctgtaaatgagtataaccaggcataattgtatcaacattattggaagcgatgtctacaattacactttgtaacgacttaattaatgcgatgatatcttgcacttgtttcttagtgtacaagtgcatgtctgttgcaacttgatcgtttctactacgtccagtatgcaacttaccaccagcatcaccaatacgtttaattaattcatgttcaatatttaaatgaatatcttctaatgatgcactaaattgaatttgatcttgatgataatcatgttgaatagattttagtccttgtataatttgttcgctgtcttgttgactaataatgccttgattcgcaagcatagttgcatgtgcaatgctgccttcgatatcttgatctatgagcgtttgatcaaaagtaatggatgcgttaaagtcgtcaacccactcttcaggttgtacttcaaatctaccgccccaagctttattgctcattgctatagcctccatgtaacatcgcatttacttgagtaggtaaaccatagatatcgataaagccaacagcagcgtcttgattaaatgcatcttcttttgtataagttgctaatttttcatcatatagtgtgtaaggtgattttctaccattcacgatggcattacctttgaataatttaattctgacatcaccacttacgtattgctgagtactatcaataaataatttcaagctatcagttaaaggtgagaaccaaagtccattatatagttgttcagcaaattgcttctcaatgattggtttaaagtgtgcgacatctttcgttaacgtaatcgtttctaatgctttatgcgcttttaaaataacttctgcagcaggtgcttcataaatttctcttgatttgatacctacaagtctattttctacatggtcaattcttccgataccatgcttaccagctaatgcattcaacgttaaaattaaatcgtctaattcatatgttttgccatcaatttgaactgggatacctttaacaaacgttaaaatgatttcatcagcagtatctggtgtttcttctaaagcatttgttagatcgaacgcatcctctggtggcgcagcataaggatcttctaaaataccacattcattcgctctgccccatagattttgatcgatagaataaggtgaatcatggttgattgatacagggatattatgtttaattgcataatcgatttcttcttcacgactccatgcccactcacgtacaggtgcgaatgctttcaatgatgggtttaatgctttaatggcaacttcgaaacgtacttggtcattccctttaccagtacaaccatgtgcaatacctactgaatttgttttctcagcaatctctactaattttttagcaattaacggtcttgataaagcagaaactaatggatatgcattttcatacattaaatttcctttgattgcataacttacatactcatcactaaattcttttgtggcatcaataatatgacattcaatagctcccatatctaaagcttttttataaacgatgtctaaatctttaccttcaccaacatctaggcaacaagctacaacgtcgtatcctttgtcgataagccattgaacggccacacttgtatctagtcctcctgaatatgctaaaacaattttctctttcataaaattcacctcattgtagttatctgaatatttcgtatgaacacatgatagcaaacttttaatgaaaataaaaccattattttacatatttattcataaaatatgatagaggtagttagatttgtaagtgtaaatgcttatttatcaatgtttaaaagtgttttaaaaaacatgcaaattgtataaaaatgtttgagtgtttgacgacagttagaaatgtttgttgaaaaataggtgtgaaacgtcacataaatatcaattttattgattaagtacaaacttgtgaattgaatcgcaaacgtaaacttagtaaaattaagatattaaatgaaacaggaggcttttatagatgactcatattcaattagattttagtaaaacgttagaatttttcggtgaacacgaattaaaacaacaacaagaaattgttaaatcaattcacaaaacaattcatgaaggtactggtgcaggtagtgacttcttaggctgggttgatttaccagttgattacgacaaagaagaattttcaagaattgttgaagcatcaaaacgcattaaagaaaattctgatgttttagtagtcatcggtattggtggttcttacttaggtgcacgtgcagcaatcgaaatgttaacgtcatcatttagaaacagcaatgaataccctgaaattgtatttgttggtaatcacttatcatcaacatacactaaagagttagttgattatttagcagacaaagatttctctgtaaacgttatttctaaatctggtacaactacagaaccagcagttgcatttagattgttcaaacaattagttgaagaaagatacggtaaagaagaagcacaaaaacgtatatttgcaacaacagataaagaaaaaggtgctttaaaacagttggctacaaacgaaggttatgaaacgttcatcgtacctgatgatgtaggtggaagatattctgttttaacagcagtaggattattaccaattgcaacagctggaattaacatcgaagctatgatgattggtgctgcaaaagcacgtgaagaattatcttcagataaattagaagaaaacattgcataccaatatgcgacaattcgaaacattttatatgcaaaaggttatacaacagaaatgttgattaactatgaaccatctatgcaatactttaatgaatggtggaaacaattatttggtgaatcagaaggtaaagacttcaaaggtatctatccttcaagtgccaactacacaactgatttacattctttaggtcaatatgtacaagaaggccgtcgtttcttattcgaaacagttgtaaaagtaaatcatcctaaatatgatattactattgaaaaagatagtgatgatctagacggattaaattatttagctggtaaaacaatcgacgaagttaacacaaaagcattcgaaggtacattattagcgcatactgatggtggtgttcctaacatggtagtgaacattccacaattagatgaagaaactttcggttatgtcgtatacttctttgaacttgcttgtgcaatgagtggataccaattaggcgtaaatccatttaaccaacctggtgtagaagcatataaacaaaacatgttcgcattattaggtaaacctggttttgaagacttgaaaaaagaattagaagagcgtttataacatacattacttcaatgattagtgatctataaaatggtataaatatagagctgaatattaagttcattgataaaaatgaaaaggcaatttctatttagagttatttaaatagaagttgtctttttatattattaaaaattttgattggtatagaattaagttacatgtatttattattagataactatatttataggaggcggttagtatgaatacaagtttgtttttaataattgctgtttttagtgttttgttgacgatgataatttctataaatgaaaagcataaaaaataaacattgtacatcgaagtgatggtaagttttgtgatatttaattagcacctataatttacagtgtaaaagaaactttaaagagaggtatatgttggaaagtttatatagaaaaatacagatagtattaataatattaacagcagttgtttgttttaatgggttattaaatactaatgtaacgttaaaaacgaatataaatatttttgtttttagtggcatattgttattggcttttatttgttgggcttatgttaaacttaacaaatttaagtaatggatgggcaatggattagaaaagcattgggaagttttaaaatataaaatgcaagtattcaacgtcagtaagtgtctgatatatataaaggtcttaggctcgtttcctacgtttagacaaatacttaagacgaagaatgttaagagaaaattaaagataaaataatatctgccatacaataatattgttatactactagagactgatttattagcatgattacatgttaatgtttctttacttagtaattaactttataatgtaagaataattatcttcagccaaagaaagggattgatgatttgtcgtttcatcaagtagaagaatggtttgagatatttcgacagtttggctatttacctggattcatattgttatatataagagcgattattccagtatttccattagcactctatattttaattaatattcaagcctatggacctattttaggtatattgattagttggcttggattaatttctggaacatttacagtctatttgatctgtaaacgattggtgaatactgagaggatgcagcgaattaaacaacgtactgctgttcaacgcttgattagttttattgatcgccaaggattaatcccattgtttattttactttgttttccttttacgccaaatacattaataaattttgtagcgagtctatctcatattagacctaaatattattttattgttttggcattatcaaaattagtttcaacaattattttaggttatttaggaaaggaaattactacaattttaacgcatcctttaagagggataataatgttagttgtgttgattgtattttggattgttggaaaaaagttagaacagcattttatggggtcgaaaaaggagtgacatcgtgaaaaaagttgtaaaatatttgatttcattgatacttgctattatcattgtactgttcgtacaaacttttgtaatagttggtcatgtcattccgaataatgatatgtcaccaacccttaacaaaggggatcgtgttattgtaaataaaattaaagttacatttaatcaattgaataatggtgatatcattacatataggcgtggtaacgagatatatactagtcgaattattgccaaacctggtcaatcaatggcgtttcgtcagggacaattataccgtgatgaccgaccggttgacgcatcttatgccaagaacagaaaaattaaagattttagtttgcgcaattttaaagaattagatggagatattataccgcctaacaattttgttgtgctaaatgatcatgataacaatcagcatgattctagacaatttggtttagttgataaaaaggatattattggtaatataagtttgacatattatcctttttcaaaatggacgattcagttcaaatcttaaaaagaggtgtcaaaattgaaaaaagaattattggaatggattatttcaattgcagtcgcttttgtcattttatttatagtaggtaaatttattgttacaccatatacaattaaaggtgaatcaatggatccaactttgaaagatggcgagcgagtagctgtaaacattattggatataaaacaggtggtttggaaaaaggtaatgtagttgtcttccatgcaaacaaaaatgatgactatgttaaacgtgtcatcggtgttcctggcgataaagtagaatataaaaatgatacattatatgtcaatggcaaaaaacaagatgaaccatatttaaactacaatttaaaacataaacaaggtgattacattactgggactttccaagttaaagatttaccgaatgcgaaccctaaatcaaatgtcattccaaaaggtaaatatttagttcttggggataatcgtgaagtaagtaaagatagccgtgcgtttggccttattgatgaagatcaaattgttggtaaagtttcatttagattctggccattcagcgaatttaaatataatttcaatcctgaaaatactaaaaattaatatgaaacaaatacaacatcgtttgtcggttttaatactgataaacgatgttttattttgtcagtaccacaataaaagctacgttcgaaatgaacttataataaatcaatcacaatcactttgtgttaaaatatgtgtcaaaggaagtgagggtttgtcatgacattacatgcttatttaggtagagcgggaacaggtaagtctacgaaaatgttgaccgaaataaaacaaaaaatgaaagcagatccgcttggagatccaatcattttaattgcgccaactcaaagtacatttcaattagaacaagcctttgtcaatgatccggaattaaatggtagtttaagaacagaagtgttgcattttgaacgattaagtcatcgtattttccaagaagttggtagttatagcgaacaaaagttatctaaagctgcaacggaaatgatgatttataacattgttcaagaacaacaaaaatatttaaaactttatcaatcacaagcaaaatattatggatttagtgaaaaattaacagaacaaattcaagattttaaaaaatatgcagtaacgcctgaacatttagaaagctttattgctgataaaaatatgcaaactcgaactaaaaataagttagaggatattgctttaatatatcgagagttcgaacaacgcattcaaaacgagtttattacgggtgaggatgcattacaatattttattgattgtatgccaaaatcagagtggctaaaacgtgctgatatatatattgatggttttcacaacttttcaacgattgagtatttaataatcaaaggattaattaaatatgcgaagagtgtcacaattatattgacgacagatggtaaccacgatcaattcagtttatttagaaaaccatctgaagtgttacgacatattgaagaaatagcaaatgaactcaatatttctattgaacgtcaatatttcaaccaattatatcgctttaataatcaagatttaaagcatcttgaacaagaatttgatgcacttcaaatcaatcgagtggcatgtcaaggtcatatcaatattttagaatctgcgactatgagagaggaaataaatgaaattgcacgacgtatcatcgttgatattcgtgataagcaattacgatatcaagatattgctattttatatcgtgacgagtcttatgcttatttatttgattccatattaccgctttataatattccttataacattgatacaaagcgttcgatgacacatcatccggtcatggaaatgattcgttcattgattgaagttattcaatctaattggcaagttaatccaatgctacgcttattgaagactgatgtgttaacggcatcatatctaaaaagtgcatacttagttgatttacttgaaaattttgtacttgaacgtggtatatacggtaaacgttggttagatgatgagctatttaatgtcgaacattttagcaaaatggggcgtaaagcgcataaactgaccgaagatgaacgtaacacatttgaacaagtcgttaagttaaagaaagatgtcattgataaaattttacattttgaaaagcaaatgtcacaagcggcaactgtaaaagactttgcaactgctttttatgaaagtatggaatattttgaactgccaaatcaattgatgacagagcgagatgaacttgatttaaatggtaatcatgaaaaggcggaagaaattgatcaaatatggaatggcttaattcaaatccttgatgacttagttctagtatttggagatgaaccaatgtcgatggaacgtttcttagaagtatttgatattggtttagaacaattagaatttgttatgattccgcaaacattggaccaagttagtattggtacgatggatttggctaaagtcgacaataagcaacatgtttacttagttggaatgaatgatggtacgatgccacaaccagtaactgcgtcaagcttgattacagatgaagaaaagaaatactttgaacagcaggctaatgtcgagttaagtccaacatcagatattttacagatggatgaagcatttgtttgttatgttgctatgactagagctaaggggaatgttacattttcttatagtctaatgggatcaagtggtgatgataaggaaatcagcccatttttaaatcaaattcaatcattgttcaaccaattggaaattactaacattcctcaataccatgaagttaacccattgtcactaatgcaacatgctaagcaaaccaaaattacattatttgaagcattgcgtgcttggttagatgatgaaattgtggctgatagttggttagatgcttatcaagtaattagagatagcgatcttttaaatcaaggtttagattatttaatgtcagcattaacgtttgacaatgaaactgtaaaattaggtgaaacgttgtctaaagaattatatggtaaagaaattaatgccagtgtgtctcgctttgagggataccaacaatgcccgtttaaacattatgcgtcacatggtctgaaactaaatgagcgaacgaagtatgaacttcaaaactttgatttaggtgatattttccattccgttttaaaatatatatctgaacgtattaatggcgattttaaacaattagacctgaaaaaaataagacaattaacgaatgaagcattggaagaaattttacctaaagttcagtttaatttattaaattcttcagcttactatcgttatttatcaagacgcattggcgctattgtagaaacaacactaagcgcattaaaatatcaaggcacgtattcaaagtttatgccaaaacattttgagacaagttttagaagaaaaccaagaacaaatgacgaattaattgcacaaacattaacgacaactcaaggtattccaattaatattagagggcaaattgaccgtatcgatacgtatacaaagaatgatacaagttttgttaatatcattgactataaatcctctgaaggtagtgcgacacttgatttaacaaaagtatattatggtatgcaaatgcaaatgatgacatacatggatatcgttttacaaaataaacaacgccttggattaacagatattgtgaaaccaggcggattattatattttcatgtacatgaacctagaattaaatttaaatcatgggctgatattgatgaagataaactagaacaagatttaattaaaaagtttaagctgagtggtttagtgaatgcagaccaaactgttattgatgcattggatattcgtttagaacctaaattcacttcagatattgtgccagttggtttgaataaagatggttctttgagtaaacgaggcagccaagttgcagatgaagcaacgatttataaattcatccaacataacaaagaaaattttatagaaacagcttcaaatattatggatggacatactgaagttgcaccattaaagtacaaacaaaaattgccatgtgctttttgtagttatcaatcggtatgtcatgtagatggcatgattgatagtaagcgatatcgaactgtagatgaaacaataaatccaattgaagcaattcaaaatattaacattgatgatgaatttgggggtgagcaatagatgacaattccagagaaaccacaaggcgtgatttggactgacgcgcaatggcaaagtatttacgcaactggacaagatgtacttgttgcagccgcggcaggttcaggtaaaacagctgtactagttgagcgtattatccaaaagattttacgtgatggcattgatgtcgatcgacttttagtcgtaacgttcacaaacttaagtgcacgtgaaatgaagcatcgtgtagaccaacgtattcaagaggcatcgattgctgatcctgcaaatgcacacttgaaaaaccaacgcatcaaaattcatcaagcacaaatatctacacttcatagtttttgcttgaaattaattcaacagcattatgatgtattaaatattgacccgaactttagaacaagcagtgaagctgaaaatattttattattagaacaaacgatagatgaagtcatagaacaacattacgatatccttgatcctgcttttattgaattaacagagcaattgtcttcagatagaagtgatgatcagtttcgaatgattattaaacaattgtatttctttagcgttgcaaatccaaatcctacaaattggttggatcaattggtgacaccatacgaagaagaagcacaacaagcgcaacttattcaactactaacagacttatctaaagtatttatcacagctgcatatgatgctttaaataaggcgtatgatttgtttagtatgatggatggcgtcgataaacatttagctgttatagaagatgaacgacgtttaatggggcgtgttttagaaggtggctttattgatataccttatttaactggtcacgaatttggcgcgcgtttgcctaatgtaacagcgaaaattaaagaagcaaatgaaatgatggtcgatgccttagaagatgctaaacttcagtataaaaaatataaatcattaattgataaagtgaaaagtgattacttttcaagagaagctgatgatttgaaagctgatatgcaacaattggcgccacgagtaaagtaccttgcgcgtattgtgaaagatgttatgtcagaattcaatcgaaaaaagcgtagcaaaaatattttggatttttctgattatgaacattttgcattacaaattttaactaatgaggatggttcgccttcagaaattgccgaatcataccgtcaacacttccaagaaatattggtcgatgagtatcaagatacgaaccgagttcaagagaaaatattatcttgtatcaaaacgggtgatgaacataatggtaatttatttatggttggagatgttaagcaatctatttataaatttagacaagctgatccaagtttatttattgaaaagtatcaacgctttactatagatggagatggcactggacgtcgaattgatttgtcgcaaaacttccgttcacgtaaagaagtactgtcaacgacaaactatatattcaaacatatgatggatgaacaagtcggtgaagtaaattatgatgaatcagcacaattgtattatggtgcaccatatgatgaatcggaccatccagtaaacttaaaagtgcttgttgaagcggatcaagaacatagtgatttaactggtagtgaacaagaagcgcattttatagtagaacaagttaaagatatcttagaacatcaaaaagtttatgatatgaaaacaggaagctatagaagtgcgacatacaaggatatcgttattctagaacgcagctttgggcaagctcgcaatttacaacaagcctttaaaaatgaagatattccgttccatgtgaatagtcgtgaaggttactttgaacaaacagaagtccgtttagtattatcatttttaagagcgatagataatccattacaagatatttatttagttgggttaatgcgctccgttatatatcagttcaaagaagacgaattagctcaaattagaatattgagtccaaatgatgactacttctatcaatcgattgtaaattacattaatgacgaagcagcagatgccattttagttgataaattaaaaatgtttttatcagatattcaaagttaccaacaatatagtaaagatcatccggtgtatcagttaattgataaattttataatgatcattatgttattcaatactttagtggacttattggtggacgtggacgacgtgcaaatctttatggtttatttaataaagctatcgagtttgagaattcaagttttagaggtttatatcaatttattcgttttatcgatgaattgattgaaagaggcaaagattttggtgaggaaaacgtagttggtccaaacgataatgtcgttagaatgatgacaattcatagtagtaaaggtctagagtttccgtttgtcatttattctggattgtcaaaagattttaataaacgtgatttgaaacaaccagttattttaaatcagcaatttggtctcggaatggattattttgatgtggataaagaaatggcatttccatctttagcttcggttgcatatagagctgttgctgaaaaagaacttgtgtcagaagaaatgcgattagtctatgtagcattaacaagagcgaaagaacaactttatttaattggtagagtgaaaaatgataaatcattactagaactagagcaattgtctatttctggtgagcacattgctgtcaatgaacgattaacttcaccaaatccgttccatcttatttatagtattttatctaaacatcaatctgcgtcaattccagatgatttaaaatttgaaaaagatatagcacaaattgaagatagtagtcgtccgaatgtaaatatttcaattgtgtactttgaagatgtgtctacagaaaccattttagataatgatgaatatcgttcggttaatcaattagaaactatgcaaaatggtaatgaagatgttaaagcacaaattaaacaccaacttgattatcaatatccatatgtaaatgatactaaaaagccctcaaaacaatctgtttctgaattgaaaagacaatatgaaacagaagaaagtggcacaagttacgaacgagtaaggcaatatcgtatcggtttttcaacgtatgaacgacctaaatttctaagtgaacaaggtaaacgaaaagcgaatgaaattggtacgttaatgcatacagtgatgcaacatttaccattcaaaaaagaacgcatatctgaagttgagttacatcagtatatcgatggattaatcgataaacatattatcgaagcagatgcgaaaaaagatatccgtatggatgaaataatgacatttatcaatagtaagttatattcgattattgctgaagcagagcaagtttatcgtgaattaccgtttgtagttaaccaagcattagtggatcaattgccacaaggagacgaagacgtctcaattattcaaggtatgattgacttgatctttgttaaagacggtgtgcattattttgtagactataaaaccgatgcatttaatcgtcgccgtgggatgacagatgaagaaattggtacacaattaaaaaataaatataagatacagatgaaatattatcaaaatacgcttcaaacgattcttaataaagaagttaaaggttatttatacttcttcaaatttggtacattgcaactgtagtattttgattttcaaaagaataaaaaataatttcgattaagtgcaaagtccttgtagcagaatgaacacaactcattttcaaaattgtcttacttatttatttgttatttgataacgaaaaaagttataatgtgaattaagataaagatgaggagttgagaatgaatgaaattcttatcattcaagtataatgacaaaacttcatatggcgttaaagtaaaacgcgaagatgctgtatgggatttaacacaagtatttgctgactttgcagaaggagatttccatcctaaaacattgttagctggtttacaacaaaatcatactttagattttcaagaacaagtacgtaaagcagttgtagcagcagaagatagcggcaaagctgaagactataaaatttcatttaatgacattgaatttttaccaccagtaacacctccgaataatgtgattgcttttggtagaaattacaaagatcatgcgaacgaattaaatcatgaagtggaaaaattatatgtatttacaaaagcagcgtcatctttaacaggagataatgcaacaattccaaatcataaagatattactgatcaattagattatgaaggtgaattaggtattgttattggtaagtctggtgaaaagattccaaaagcattagctttagattatgtttacggctatacaattattaacgatatcactgatcgcaaagcgcaaagtgaacaagatcaagcatttttatcaaaaagtttaactggcggttgcccaatgggtccttatatcgttactaaagacgaactaccattacctgaaaatgtaaatattgttacaaaagttaacaatgaaattagacaagatggtaacactggcgaaatgattcttaaaattgatgaattaatagaagaaatttcaaaatatgttgcactacatccgggagatattattgcaactggtacaccagcaggcgttggtgcaggtatgcaaccacctaaattcttacaaccaggtgatgaagttaaagtgactattgataatattggaacgctgacaacttatatcgctaaataattatcatttaaaaagctaaccggtctttatatagattggttagttttttcttgcttttctaaaaaggtgttaaagatcattgtttataatgttaccattttgagacgaaagtgaaatgttgatattaagcagtagttgattattttacagcagatgcacaatattctaataagtaataaaatgtcatgttcttcctcacaaatatagaagtgtggtaaaatatatatttgtgtatgaataaataatgattaaattataagaaagtgggtatttatcccacgaagttttaatttaataactaaaattattaaagtgggggaattaatatgttacatttacatattttaagttgggtattagcaatcattttatttatcgctacatacttaaatatttcaaaaaatcaaggtggcacgccatatttcaaaccattacatatggtactacgattatttatgctgttgacgttaatttcaggattttggatattaattcagtcatttatgaatggcggggcaaatcatatgttgcttacattgaaaatgctgtgtggtgttgcagtagttggattgatggaagtgtcgattgctaaaagaaagagacatgaacaaagtcacacaatgttttggataacaattgcattaattatcatcacaatggtattaggtgtcattctaccgttagggcctttatcaaaattattcggtattggctaattgataagacatatagtaaatgacataaggcatggacaattataagtccaagaccttatgtcttttttgattctaaaaatgtttaaacaaaaaaatggactggatagtagtaccagtccaacataattctaacctagagaattaagattagattgaatcgcatgattcatttatttagctttgtaaccaatcatattgattaaatctttagggtggctatatggtggtgcataagccacttcaaactcagttaactcatctacagttagctggttcatcattgccatcgatagtacatcaatccgtttatctgcgccttcttttcctactgcagctgctcttaaaatctgacggtttgaagtgtcataatatactcttaagtgtaaaggggaatttcctgggtaataattcgcgtgtgcaccttgagtgacttccaccattttatagtcaaattgctttagttcgtttggtttaacgccgacactcgcaaatgtataatcaaagaacttcacaatattgttgcctaagaagcctttgaattcaatagtgtcatttccagcaatttgttcggcaacaatacttgctgcacgatgagcgccccaagctaaaggaacactggccggtagatcgacatgtcgataatgtgatgttgcaatatcgcctattgcataaatgtttggaacatttgtttcaaatttatcgtttaccggtatgaaaccttttcgatcaagtttgatatttgaactttcgataaattttgaattggggtgagtaccgacaccttcaataatcatatcgtaatgttcaacttttcctgatttaaatgtaatttcattttcattgataacaacaatttcctcatttaaacggtatggaatctcccgcttatctaattcatcaagtataggttgattcatgtcggcatccattaatttatttatcttatcagatcgatgaattaaagtagggtgtaaaccacgttcataaagattttcaagaacttctaatgaaacataccctgcacctacaaccaatactttatcaacttgatttgctttgatgaattgatcgatagcatcagtgtcttctaaatttctaagtgtaaatgtaatatcactttcaaagccaaggctatttgcacttgcaccagggcttaatatgagtttatcgtaagattcttcaaattgttcgttggtctttctatttaatacagatacagtttgtctttcatcattgattgcaataacttcatgataagtttttactgtaatttgttttctatcataaaatttttcaggtgtatatgctaaagcatattttctatcttcaacaacttcgccaatgacataaggcaatgcacaattagcaaagctcatatcacgatctttttcaaaaataataatgtcactttctttatctaaacgtcgaatttggctggcacatgtagcaccgccagcgactgctccgactacgactattttgggcatcgtaacttacctcctattgttttaaaatattataaaatgattagttataaattaacagtaatatctaatatttaaattaaagaaatcattcaaatatcgaccaatgccatcttcattattgttgaatgtaatattgttcgctacatctttaagttcttgcaaaccattttccatagcaacaccatggcgggcgtactcaatcatttctatatcattatcttcatcaccgaatgcaataatattatttcggtcaatatttaaaaattgtctaacttgttcaatacctcttgctttattaataccaagttttacaatttcaatgacagggaatggtgcgccccagcgtcgatgctcaatatgatcggcataaaaatgagtaagcatatttttgatttcaggtattttactttcttcggcttcaattaaaattgaggtaggggattctttcaagtggacaagtaaattaccagtttgaattcttggattacccattgaaaaaccttcaaataatcttggatcatgattgttaatgaaaacataatctttcacttctgcaataatattcgatacttgatattgttgtaatccttgaataatattttgtgcgatgcctaaatctaaaatttcatggcaagttttgaagtttttatctttagggtgatgtacgtaagcgccattaaaattaacaattggtgtcgttaaatttaattcatgataatacatttgacttgcacgataaggtctgccagtcgcaatcataatttggtgtccacgttgttgtaattcatttaatacttgtttagtatatgatgaaatttctttgttatcgtttaataatgttccgtctaagtctagacatattaaatgtggttgcatatctctctcctcataagttgcttagttcatatagatacatcatagcattttattggcgttttgtcggatatttgatatattatgaataatatgacattaaagaggtgatatggatggaagaggcattgaaagatagtatcttaggtgcattagaaatggtaattgaccctgaattaggaattgatatcgttaatttaggtttagtatacaaagtgaatgttgatgatgaaggcgtatgtacagttgatatgactttaacatcaatgggatgtccaatgggacctcaaattattgatcaagttaaaacagtattagcagagattcctgaaattcaggatactgaagtgaatatcgtatggagtccaccttggacaaaagatatgatgtcacgttacgctaagattgcacttggtgtgagctaacataaacttgtattgcttgtagaaattggaaatccaattggggctccgctcccaacttgcattgcttgtagaatttcttttcgaaattctctgtgttggggccccgcagtcaatataacattgtagagtataattcattgtgaataagctcccttcaaagtagacattgaagggagccttatttacgttcaaggttctgattttattttgaaaatttatatctaacttgtttcaaaaaatatgaactaagacagtgactcgcacttctaatagtgtacaattcatttcctagttgaatattttcgggaaaatttttataataaattgaatttatattacagttatattacaatacataatacttcatagtttttaagttgccgagttgcattacaaattggatttcgaagtaagaatcatcattggtaattttttaatttaacagtattttagtcaatatgattttgatgatgtcgtaattcaataatatacatatgcatttcaatattcttttaaacagcataactaaatttaattaagcatctaagaagaacagttttaaaagggaagaatgcaaaaatgaacaaaacaaagggttttacaaaatataagaaaatgagatatatgccagggctcgatggtttgagggcaatcgctgttctaggaattattatttaccacttaaataagcaatggttgacaggtggctttttaggtgtggatacattttttgtgatctctggttatttaattacaagcttattactcaaagagtatgatgacacaggtatcattaaattgaaaagcttttggatacgtcgtttaaaacgtttattaccagcagtcatagttttattaatggttgtagggacagcaaccttattattaaaatcagataatatcattagggttaaacatgatattattgctgcgatattttatgtatcaaattggtggtatatagcaaaagatgttaattattttgagcaattttcatttatgccattaaagcatttatggtctttagcaattgaagaacagttttacatatttttcccagttattttggttacattattgttaacaattaaaaagcgatacaaaataggatttatttttttgggagtatctataatttctttagggttaatgatgtttatctacagtattaatggggatcattcacgagtgtattttggaacagatacaagattacagacattgttactgggtgttattttagcttttttatggccaccgtttaaattgaaaaatgatccacctaaagttgtaaaatatgttattgatagcataggtagtttatcatttatagtacttatattattatttttcattattaatgatgagacgaattggatatatgatggaggtttctatttaatttccatattaacgttatttattattgccagtgtcgttcatccatctacatggatagcgaagatattttcaaatccagtgttagtatttaccgggaaaagatcttacagtctatatttatggcattttgcagtaattagtttcgtacatagttactatgtagacggacagatacctgtatatgtgtactttatagatataagtttaacaattatatttgcagagctatcatatcgctttatagaaactccatttagaaaagaaggtattaaagctttaaattggcgaccttcttatataccacaatttataagaatggcaattgtagtaaccttgttaattccatttatgttgattttagtaggtgcattcaataaatatggtaaagacattataggagaaaaagcgaatagctttgataccactattgaagataattatttaatgcggatagcaccaattgataacattcacattgatggcttagtaagtgagaagaaaaaggaatcttccgacgtatataataatattaaacctcttttaatcggtgattcagtaatggttgatatcggtgagtcatttaagtcatcagttcctaagtctagaattgatggaaaagtagggcgtcaattgtatcaaaccttacctttagttaaagcgaattattcacaatataaaaaatcatctgatcaagttgtattagaattaggtacaaatggcgactttactgtcaaacagctcgacgatttacttaatcaatttggaaaagccaagatttatttagttaatacacgtgttccaagaatttatgaggcaaatgtaaatcgattattagctgacgcggcgaaacgaaagtccaatgtcacattaattgattggtataagcgatcacaaggacatagtgaatattttgcaccagacggtgtacatttagagtacaaaggagtcctagctttaaaagatgaaatattaaaagcacttaaaaagaaataacatatgtttaataagtctagttaatgtgtaacgtaacattagctagatttttttaattcaaaaaattatttacaaatattaggaaatttaagtgtaaaagagttgataaatgattatattgggactataatataattaaggtcaaagaaagtcaaagtcaaaagtgcaacttgaccaactctacaaattagaggtgaaattaatggatataaataaaatgacatatgctgttcaaagtgctttacaacaagcagttgaactgagtcagcaacataaattacaaaatatagaaattgaggcaattttaagcgctgccttaaatgaaagtgaaagcttatataaaagtattttagaacgagcaaatattgaggtagatcaattaaacaaagcttatgaagacaaactaaatacgtatgcatctgtagaaggtgacaatatacaatatggtcaatatattagccaacaagcaaaccaattgataactaaggctgaatcatacatgaaagaatatgaagatgaatatatttcaatggagcatattttatgttcggcaatggacattgatcaaacaacaaaacattatataaataataaagtagaagttatcaaagaaattattaaaaaagtaagagggggaaatcacgtgacatcacaaaatccagaagttaattacgaagcattagctaaatatggccgcgacttagtagaagaagttagacaaggtaaaatggatcctgttataggaagagatgaagaaattcgaaatacgattcgtattttaagtcgtaaaactaaaaacaaccctgtgctcattggtgaaccaggtgttggtaaaactgcaattgttgaaggattagcgcagcgtatagttaagaaagatgtgccagaatcattattagataaaactgtttttgagttagatttaagcgcattagtagcgggcgctaaatatcgtggtgaatttgaagagagattaaaagcagtcctaaaagaagttaaagagtctgatggtagaattatattatttattgatgaaatccatatgcttgtaggtgctggtaaaacagatggtgccatggatgcaggcaacatgctaaaaccaatgttagcacgaggagagttacattgtattggtgcaacaactttaaatgaatatagagaatatattgaaaaagattcggcattagagcgtcgtttccaaaaagtagcagttagtgagcctgatgttgaagatacaatttcaattttacgtggtttaaaagaacgatatgaagtgtatcatggtgtgcgtattcaagatagagccttagttgctgccgctgaattgtctgatcgttacatcactgatcgttttttaccagataaagcgattgatttagttgaccaagcatgtgcaacaattcgtacggaaatgggatcaaatccaactgaattggatcaagttaatagacgtgttatgcaattagaaattgaagaaagcgcacttaaaaatgaatctgacaatgcgagcaaacagagattacaagaactacaagaagagcttgccaatgaaaaagagaaacaagcagcacttcaatctcgtgtagaatcagaaaaagaaaaaatagcaaacttacaagaaaaacgtgcgcaactagatgaaagtagacaagcgttggaagatgcacaaacaaataacaatttagaaaaagcagctgaactacaatatggaacaattcctcaattggaaaaagaacttagagaattagaggataatttccaagatgagcaaggtgaagatacagatcgaatgattcgtgaagttgtaacagacgaagaaattggcgatattgtcagccaatggacaggcataccagtttcaaaattagttgaaacagaacgtgaaaaattacttcacttaagtgatatcttgcataaacgtgttgtaggtcaagataaagcggttgacctggtttcagatgcagtagttagagcaagagcaggtattaaagatccaaacagacctattggtagtttcttattcctaggtccaactggggtaggtaaaactgaattagctaaatcattagctgcatcattatttgattctgaaaaacatatgattcgtatcgatatgagtgaatatatggaaaaacatgcagtatcaagattgataggggcacctccaggatatattggacatgatgaagggggtcaattaactgaagcggttcgtcgtaatccatactcagttatcttattagatgaggttgaaaaagcgcatactgacgtctttaatgtattattgcaaattttagatgaaggccgtttaactgattctaaaggacgtagcgttgattttaaaaatactattattattatgacaagtaatattggatctcaagttttattagaaaacgtaaaagagactggtgaaattacagaatcaacagaaaaagctgttatgacaagtttaaatgcatatttcaaaccagaaattttgaatcgtatggatgacatcgtattatttaaacctctatccattgatgacatgagtatgattgtagataaaatattaacgcaattaaatataagattactagaacaacgaatctcaattgaagtttctgatgatgctaaagcttggctaggtcaagaagcttatgaacctcaatacggtgcaagaccattaaaacgttttgtacaacgccaaattgaaacaccattagcacgtatgatgattaaagagggattcccagaaggtacaacgattaaagttaatttaaattcagacaataacttaacgtttaatgctgaaaaaattcatgaataaaattgaaccaagaatgtgatgattaatcgcattcttggttttttagatttgaaatttattataattgttcattggcaatatactttttaaatgatttaataaacgccaatatttctggactttcttttttgctgtatatatatgtaaatgaaataggtgcttgtaaaattttcgtgttaataaccgaaatattgtaattactatttgttgttatataaataggcaggaatgatatgccttgattcatttcgattaatttaattgaagtatgcacatcattgatagatagaaattgtgctttttcataaatatttaaaatattatttttaagtgatgaccaatattctggatggttatcacttattattttgtatttttcaaataaagatgcctcagttagaagatgattattctctttattgggagcaatcaatacaattttaccttcacatactttttcagaatgaacttctcttagtttaggttgatttctgctaatcccaatgtcatacgtatgattattaatatctttttcaatattttcatttttgacatggagagaaacatcgataaacggatgctcgttaaagaaagattttaaaaatttgggcataatgaatgtcgcgatatatgaagacacgacaacatttaatttcgattgaaacatcgtctttttaagttggatatgtttgatgccactttcatattgttcaataaaactttgcgcaattggaagaaatgtatgaccatcttcagtcaagataatttgacttttataagtttcaaatagtttcacattgagatgttgttctaaatttttaatttgcttatgtatagaaggtatagtgagattaatttcttcactagctaatcgatagtttaacgtcttcgctaaaatgacaaatgtatagtaccaatccaaattcatgaacttacctctttcaaaaaagttaataattcattagataatatttaatttttattgcataaaaataatattaatattatatcagaggttatcgagggggtgaagtaatatgattcgaattcaagataatacaataagggatggtatgcaaaaaagtaatgttcgaaaaagtctatttataaaaaaaagaagtattgaaacaaattaacaagttaaatataaattctgttgaagtaggcatgtgtactactatcgaggatgaatttaatattcatcaattcagagacattttaagccctgaaaaagaattagtagtattgactaggcttaatgaaaaagaaataaaaaaaatagtcaaattgaaaattcataatttagtggtaaaaatactatttccaatatctgacttgcatataaaagaaaagcttaatttttcaaataaatattatattcagaaaatcaaagactgcttggatatattaaagaaagataaaaaaggagtagatatttgttttgaagatgcaacaaggacttctagagaaaaattgaaagaatacatggaaattatttcaaaatatcaagttagaacagttacatttgcggacactgtaggatgttcgacaccattagaatacggagatatttttaattactttgtaaaaaaatattctaacataattttttctgctcattgtcataacgatctagggttggctactgcaaatacattagctgcaattttaaatggtgcaaagcaaatagaaactacatttttgggaattggtgagagagcgggtaatgctcctattgaggaaataattactattttgacaaaaaaacaaatagaaagtacggaattcactttacccgacgtatataaaactagtattaatatttctaaaattctcgattttcaaatatcagaaaacaaacctataattggtgaaaatatatttaaacatgaatcaggaattcatcaagatggtactaaaaaaaatataaatatgtatcaatatttagttcctagtgatttaggattgaaaaattcacaagttgttcagtttccaataagtaatatttctagtaagaaaatcttgcacaataaatttaaatcaatagttaacactgaagaaattgatgaaaatatttctttctataaacttgtgaacaagttttcacctgaagtagcacctgaagatacagtggatttacttcagataataaaaaggaggagtaaagatggaaattttaaatgattctgtaaaaagttttgaaaaactttatttacaattacaagatggttttccagtgattgttcctactgatactaattataatttatgtagtttacctaacaacgatctttgtatcgataaaatatttgaatataaaaagcgatcgaaagataagccattatcattatttattgataagccagaggattggaaattgtatggagataatcaaaatacggaaatagttgataaactagttgaaatattttggcctggaccattaaatattattttaaaaaataaaacaagttataattatatgctcaataattcagatagtatagctataggatgtgtacaaaataaaacgatgagaagatttatttcatatattaattcacctatagcaattacttcagcaaatatctctggaactgccgatgatattttaataactgaaaatgaagcaattaagcacatgggcgaaaatgtaagatatatgctaagaagtcaaaataaaactaactataaaacatctagtacgattattaaagtgacagataataaaattgaattattaagagaaggagatataaagtttgaagaaataaaagaaagactaggtacaggtattatttatgaataagttaatacttgggatttatttataccgaattttttcacgagcatacttttatttaccgtttttattaatttactttttgattcaaggttattccataatacaattagaaatattaatggcgtcttatggcattgcagcatttttattctctctatacaaagagaagtgttttaaaatttgtaacttaaaagattctaataaattagttgttagtgaaatattcaaaatcatcggtttattgttgttattatatcaaaatcaatatttaattttagtagtggcacaaatattattagggttaagttactcaatgatggcgggtgttgatacagcaataattaaaagaaatataacaaatgagaaatacgtacaaaataagtcaaatagctatatgttcctatcattattaatttcagggattataggtagttatctttatggaataaatattaaatggcctataataatgactggtatattttcaattctaacaattataattattcgatgcacattagttgaaaatagggaattaaatttaataggagaaacaaagggaaagataaagaaatttctaccggaagagaagttttggatattgcattattcttttttaagagcgttaatattaggattttttataggatttattccaattaatatatataatgatttaaaactgaataatttacaatttatttcagtattaacttgttacacagttatgggttttgtatcttcacgttatttaactaaatacttgaactataagtttgtgtcagaaatttgtttagtaatatttttaataatatatacatatcaaagtttcatagcagttactatttctatgatatttttaggtatttcttcagggttaactcgtccacaaactataaataaactttctagcagtagtaacttaagagtgatgcttaattatgcagaaacgttatattttatttttaatatcgcatttttacttatgggtggttacttatatacaataggaactattcaatacttaatattatttatttcgttattaatttttatatatttaataataatattttattttacaaggagagagcaacatgaaaataaaaactgaatttaaagggaacaatataccatatgaatacgcagcaggtgcagatgtgagtgattctattaacgggaatccaattaaatcatttccatttgaagtaactgaattaccggaagggactaaatatcttgcttggtctttaattgactatgatgcaattcctgtgtgtggctttgcatggattcattggagtgtagctaatgtaagtgttagtggcaattcaatttctataaaagcagatttatcaagaacaaagggtgactatgtacaaggtaaaaatagctttactagtgggttgttggctgaagatttttcagaaatagaaaatcactatgtaggaccaacaccacctgataaagatcatcaatatgaattaacagtttatgcattagatcattctttaaatttgaagaatgggttctacttgaatgaatttttaaaagaagtaaatcaacataaaattgatcaaacaagtattaaccttataggaagaaaaatttaatactaaatatctcatcaatataaaattgttcaattaaaagtatgaagaaacaagggatttaatttatatattaggtacggcgttcgctataatgcaaagaagtaattaaatttaagaaatgtaaacttagttattgtaatgtgaatttattcgaaaaaatagaaagtgttaacaattacagcttttacattaattaaaatttatttttaaaaacaagtaaacaatttacatacttataatttttgaaacttttagatttgtgttatattgattttgtaagatactttaactcacaaaggagagagattatatgaaattaaaatcatttataactgtaactttggcactgggcatgatcgcaacgactggcgctactgtggcaagtaatgaggtatctgcagcagaaaaggacaaactaccggcaactcaaaaagctaaagaaatgcaaaatgttccatatacaattgcagtagatggcattatggctttcaatcaatcttacttaaatttaccaaaagatagccaattatcatatttagatttaggaaataaagttaaagctttattatatgatgaacgtggtgtaacacctgagaagattcgaaatgcaaaatctgccgtttacacgattacttggaaagatggcagtaaaaaagaagtggatttaaagaaagatagttatacagcaaacttgtttgattcaaattcaattaaacaaattgatattaatgtaaaaactaaataaacacttaaaattatcaaattcaacatgaagcatttaattttacagtgatgattataatataattgccttgatacaaagattactcgtaaatgacatctttgtattaaggcttttctaaattttaatgtgatgggttagaggtcattgagctttaaaatattcataatacaaaacatttatggccaaaaataaaagccgcctttatctgggcagcttcaataataagaaagacatatttcattttatactaaatagttattgtgatgaatctttcggcggtttaattactgcagcaaaaattgctgtgaaaatcgtgaacaatactgccatgataattggattcactacatttaagctgtctccacctactaggctattaagtacaaagttaaccatttgcattaataataatgcccaaaagaatgttacgaggtgtttcatgtcattctacctccactttaattatatatattttattttaagtgaaagttagaaatttgtatagtaacatctcatatattttgaccatattatacagtttaaataaatgattttatctgaatggctattctaatttaagcgcattaaaaccaatttcatactgaaatttgacgataataaagcattaaaattttattaactagtcaatattcctacgtctgacttgagtttaaaaagtaatctatgttaaattaatacctggtattaaaaattttattaagaaggtgttcaactatgaacgtgggtattaaaggttttggtgcatatgcaccagaaaagattattgacaatgcctattttgagcaatttttagatacatctgatgaatggatttctaagatgactggaattaaagaaagacattgggcagatgacgatcaagatacttcagatttagcatatgaagcaagtgtaaaagcaatcgctgacgctggtattcagcccgaagatatagatatgataattgttgccacagcaactggagatatgccatttccaactgtcgcaaatatgttgcaagaacgtttagggacgggcaaagttgcctctatggatcaacttgcagcatgttctggatttatgtattcaatgattacagctaaacaatatgttcaatctggagattatcataatattttagttgtcggtgcagataaattatctaaaataacagatttaactgaccgttctactgcagttctatttggagatggtgcaggtgcggttatcatcggtgaagtttcagaaggcagaggtattataagttatgaaatgggttctgatggcactggtggtaaacatttatatttagataaagatactggtaaactgaaaatgaatggtcgagaagtatttaaatttgctgttagaattatgggtgatgcatcaacacgtgtagttgaaaaagcgaatttaacatcagatgatatagatttatttattcctcatcaagctaatattagaattatggaatcagctagagaacgcttaggtatttcaaaagacaaaatgagtgtttctgtaaataaatatggaaatacttcagctgcgtcaatacctttaagtatcgatcaagaattaaaaaatggtaaactcaaagatgatgatacaattgttcttgtcggattcggtggcggcctaacttggggcgcaatgacaataaaatggggaaaataggaggataacgaatgagtcaaaataaaagagtagttattacaggtatgggagccctttctccaatcggtaatgatgtcaaaacaacatgggagaatgctctaaaaggcgtaaatggtatcgataaaattacacgtatcgatactgaaccttatagcgttcacttagcaggagaacttaaaaactttaatattgaagatcatatcgacaaaaaagaagcgcgtcgtatggatagatttactcaatatgcaattgtagcagctagagaggctgttaaagatgcgcaattagatatcaatgaaaatactgcagatcgaatcggtgtatggattggttctggtatcggtggtatggaaacatttgaaattgcacataaacaattaatggataaaggcccaagacgtgtgagtccatttttcgtaccaatgttaattcctgatatggcaactggacaagtatcaattgacttaggtgcaaaaggaccaaatggtgcaacagttacagcatgtgcaacaggtacaaactcaatcggagaagcatttaaaattgtgcaacgcggtgatgcagatgcaatgattactggtggtacagaagcaccaattactcatatggcaattgcaggtttcagtgcaagtcgagcgctttctacaaatgatgacattgaaacagcatgtcgtccattccaagaaggcagagacggttttgttatgggtgaaggtgctggtattttagtaatcgaatctttagaatcagcacaagctcgaggtgccaatatttatgctgagatagttggctatggtactacaggtgatgcttatcatattacagcaccagctccagaaggtgaaggcggttctagagcaatgcaagcagctatggatgatgctggtattgaacctaaagatgtacaatacttaaatgcccatggtacaagtactcctgttggtgacttaaatgaagttaaagctattaaaaatacatttggtgaagcagctaaacacttaaaagttagctcaacaaaatcaatgactggtcacttacttggtgcaacaggtggaattgaagcaatcttctcagcgctttcaattaaagactctaaagtcgcaccgacaattcatgcggtaacaccagacccagaatgtgatttggatattgttccaaatgaagcgcaagaccttgatattacttatgcaatgagtaatagcttaggattcggtggacataacgcagtattagtattcaagaaatttgaagcataattataaaaatcttcagtaacgttgttttagttactgaagattttttctgtttctttatactaagatgagcgacagcacaatcgccataataaaatataaaatatttattaataataagggtattatccatgtagaaacaaagtaatgctctttttttacctcttgtgggttgaaaaatggatcatcagagatagacttcttctttttcgaagatgacatttgatactttaatcttctaaaaccataacttgtcgcatcaaaaatgccttcttgtacaagtaaaatcaaaaatatgctaataaaaataattaatgaaacataaaacaatatatttaaatatgtaatgatagtatggctattaaaaacccatataataaacgttaacattggggttattagtgccattccaagccattttttcaacatttgatcactcccacttatagaaaactcttacgcatagtttacattaaaatgagacattgaggaatgattttttaatttcttcagttttattgaaattctaaaatcaatcattcttcattagtttaaagcaaaaaaatattgatatatagtaaatattgtatatataatattagttaagatttcagaaaattttgaagggaatggaaatttagaaatcggaatttgttagaggaggggattagatggggaaatatattttcaaacgatttatttatatgcttatttctttatttattattattacaattacatttttcttaatgaaattaatgccaggttcgccatttaacgatgctaaattaaatgctgaacaaaaagaaattttaaatgaaaaatatggattaaatgatcctgtagctacgcagtatttacattatttaaaaaatgttgttacaggcgattttggtaattcattccagtatcataatcaacctgtgtgggatttgattaaaccaagactactaccttcttttgaaatgggtcttacagcgatgttcatcggtgtgatactgggacttattttaggtgttgcagcagctactaaacaaaattcttgggttgactatacaactacagttatttcagttattgcagtatctgtaccatcttttgtacttgctgtacttttacaatatgtatttgcagttaaattaagatggttcccagtagctgggtgggaaggtttttcgaccgcggtattaccgtcacttgcattatctgcagctgttttagcaactgtcgccagatacataagagcagagatgatagaggtattaagttcagactacattttattagcgagagctaaaggtaattcgacaatgcgtgtactttttggacatgcacttagaaatgctttaattccaattattacaattatcgttcccatgttagcaagtattttaacaggcactttaacaattgaaaatatttttggggttcctggattaggggatcaattcgtacgttcaattacaacaaatgatttctcagtaatcatggcaatcacactattatttagcacattgtttatcgtttctatttttattgtagatattttgtacggtgtgatagatccacgaattcgtgttcaaggaggtaaaaaataatggctgaaaataaaaacaatttgtcgattaacgacgatcattctaatgcagctatgacacatacctctgacgctatcgcatcatctgattttattattagagaattagatttgaatcaggaacctgaaatgcaacgagaaagcaaaaacttttggcaagatgcttgggctcagttaaaacgaaataagttagctgttgtcggtatgataggtttaattatcattgtaatatttgcttttatcggtccagttataaataaacatgattatgctgaacaaaatgtacaacatagaaatcttccggcaaaaatacctgtattagacaaagttccatttttaccttttgatggtaaagatgcagatggcaaggatgcttataaagcagcaaatgctaaagaaaattattggtttggtactgatcagttgggtcgagatttatggacaagaacatggaaaggtgctcaaatttcattgtttatcggtgttgttgcagcgatgttagatatttttattggcgttgtatatggtgcgatttctggattcttcggtggacgtgtcgatacgattatgcaacgtatacttgaagtcatagcatctattccgaatttaattgtcgtaattttatttgtattaatttttgaaccatccatttggacaattatattggctatgtctatcacaggctggttaggcatgagcagagttgtacgtggagaatttttaaaattgaaaaatcaagagtttgtcatggcttcgaaaacattgggggcttcaaaattcaaattgatatttaagcatattttacctaatacgttaggtgctatcgtggttacatcaatgtttacaatacctagtgctattttcttcgaagcatttttaagtttcattggtataggtgtacccgcacctcaaacatcgttaggatcattagtaaatgatgggcgcgcaatgttattaatttatccacatgaattatttataccagcaatgattttaagtttattaattctattcttttacttatttagtgatggattacgtgatgcatttgatccgaaaatgcgtaaataaaagggggcatagcatatgactgaaagaatattagaagtaaatgatttgcatgtttcctttgatattacagcaggggaagtgcaggcagtgagaggtgtagatttttatttaaacaaaggggaaacattggcaattgttggtgaatcaggttcaggtaaatctgtaacaacaaaagcaattacaaaattattccaaggggacacaggaagaattaaaaagggagaaattttatttttaggggaagatttagcaaaaaaacctgaaaatgagttaattaaattacgtggcaaagatatttcaatgatctttcaagatccaatgacatctttaaacccaacgatgcaaattggtaaacaagtcatggaaccattaattaagcacaaaaattatagtaaagcacaagctaaaaagcgcgcattggaaatactaaatcttgtaggtttaccaaatgcagaaaaaagatttaaagcatatccacatcaattttcaggtggacaaaggcaaagaattgttattgcaaccgcattagcttgtgaacctaaagtgctcattgctgatgaaccaacgactgcattagacgtaacgatgcaggcacaaattttagatttaatgaaagaactacaacaaaaaatcgatacagcaattatttttataacgcatgatttaggggttgttgcgaatattgctgatagagtggcagttatgtatggtggtcaaatggttgaaacaggagatgttaacgaaatattttatgatccaaagcatccatatacatggggattattatcgtcaatgcctgatttatcaacaacaaatgacacaccattactagcgattcctggagcgccacctgatttattacacccacctaaaggtgatgcatttgctagacgtagtcaatatgcattagatattgattttaaagtagaaccaccgtggtttaaagtttcaccgacacattttgtgaaatcttggttattagacgcacgtgcaccaaaagttgaactacccgagctggtaaaacaacgtatgaaaccgatgcctaataattatgaaaaaccactcaaggtagaaagggtgtcgttcaatgaaaaatgatgaagtgctattatctattaaaaatttaaagcaatattttaacgcaggaaagaaaaacgaagtgagagcgattgaaaatatttcgtttgaaatatacaaaggggaaacattaggtttagtaggagaatcggggtgtggtaaatctacaactggtaaatcaattatcaaacttaatgatattacaagtggagaaattttgtatgagggtattgatatacaaaagattcgtaaacgtaaagatttgcttaaatttaataaaaagatacagatgatttttcaagacccatatgcgtctttaaatcctaggttaaaagtaatggatatagtagctgaaggtattgatatccatcatttagcaactgataaacgtgagcgtaaaaaacgtgtctatgatttacttgaaactgttggattaagtaaagaacatgccaatcgttatcctcatgaattttcaggtggacaacgccaacgtattggaattgcccgtgcattagccgttgaaccagaatttattatagcagatgaacctatttcagcattggatgtttcaattcaagctcaagtagtcaatttgttattaaaattacagcgtgaaaaaggtattacattcctatttattgcacatgatttatcaatggtgaagtatatctctgatcgaattgcagtcatgcattttgggaaaattgtagaaatcggaccagcagacgatatttatcaatatccattacatgattatactaagtctttattgtcggcaattcctcaaccggatcctgaatcggaacgtagtcgcaaacgatttagttatattgatgatgaagcaaataatcatttaagacaattacatgaaataagaccaaagcattttgtttttagtactgaagatgaagcggcacgactacgaaaaaatttgttggtaacacaagattaaggggaagggggaaataaaatgacaagaaagttaaaaacgctgattttaatatttgttgccacaattgcattaagtggttgtgctaatgacgatggtatttattcagataaaggtcaagtattcagaaaaattttgtcagcagacttaacatcacttgatacatcattaattacggatgaaatatcttctgaagtgactgcgcaaacattcgaaggtttatatacattaggaaaaggtgacaaaccggtgttaggtgttgcgaaagcttttccagaaaagagtaaagatgggaaaactttaaaggttaaattaagaagcgatgctaaatggagcaatggtgacaaagtgactgcacaagactttgtttatgcttggagaaaaacagttgaccctaaaacaggttctgaatttgcatacattatgggggacattaaaaatgcgagtgatattagtactggtaagaaacctgtagagcaattaggtatcaaagcattagatgatgaaacattacaaattgaattagaaaagccggttccatatattaatcaattattagcacttaatacatttgcacctcaaaatgaaaaagttgccaaaaaatatggtaaaaattatggtacggcagctgatagagcggtatacaatggtccatttaaagttgatgattggaaacaagaagataaaaccttactatctaaaaatcagtattattgggataaaaagaatgtaaaattagataaagtgaattataaagttattaaagacttacaagcaggtgcatcattgtatgatactgaatcagtagatgacgcagttattacagcagatcaagtaaataaatataaagataataaaggtttaaactttgtgttaacgtctgggacattttttgtgaaaatgaatgaaaaacaatatcctgattttaaaaacaaaaatttaagattggctatcgcgcaagcaatagataaaaaaggatacgttgattcagtgaaaaacaatggctcaattccttccgatacattaacagccaaaggcattgcgaaagcgcctaatggcaaagattatgcgagtaccatgaattcgcctttaaaatataatcctaaagaagcaagagaacactgggacaaagctaaaaaagagttaggtaaaaatgaattgacattttcaatgaacacagaagatacaccagatgcaaaaatatctgctgaatacatcaaatcacaagttgagaaaaatttaccaggtgtcactttgaaaattaaacaattaccgtttaaacaaagagtatcactagaactgagtaacaattttgaagcatcacttagtggttggtctgcagattaccctgatcctatggcttacttagaaacaatgaccacaggtagcgcacaaaataatacagactggggtaataaagaatacgatcaattacttaaagtagcaagaaccaaattggcacttcaaccgaacgaacgatatgaaaacttgaaaaaagcagaagaaatgttcctaggagatgcaccggtagcaccaatttatcaaaaaggtgttgcacatttaacaaatcctcaagtaaaaggattgatttaccataaatttggtccaaataactcacttaaacatgtatatattgataaatcgatagataaagaaacaggtaagaagaaaaaataatatgctttgtaaattaggctggagatatatctccagtctttttgtattgcagaaaaaccttgggaaaaaattaaaataagtcgttttttaaattactgaaattgattaaatgcattaatgactgaatattctaaaaataaacttgtaataattttttctatgagtaaactaaaaagaaaaaattagattgaaagtaggaggcatataaatggggaagctaattaaatatatttcaatacttattgttatcgttttagtgttgagtgcttgcggaaaaagcagtaataaagatgaaggagtaaaagatgctactaaaacagaaacctcaaaacataaaggtggtaccttaaatgtagcattaacagcaccgccaagtggcgtttattcttcgttattaaatagtacacatgcagatgctgtagttgaaggatattttaacgaaagcttattagcaattgataaaaaaatacgtcctaaggcatatattgcttcatggaaggacatcgagccggctaagaaaatagaatttaaaattaaaaaaggtattaaatggcatgatggcaatgaattaaaaattgatgattggatttattcaattgaagtcttagctaacaaggattacgaaggcgcttattatcctagtgtagaaaatatccaaggtgcaaaagattatcatgaaggaaaagctgatcatattagcggattgaagaaaatagatgactacactatgcaggttacatttgataaaaagcaagaaaattacttaacaggatttattactggacctttattaagtaaaaaatatttatcagatgtaccaattaaagatttagcgaaatcagataaaatccgaaaatatcctattggtattggaccatataaagttaagaaaatcgtcccaggtgaggctgttcaacttgttaaatttgatgattattggcaaggtaagcctgcattagacaaaatcaatttgaaagttattgatcaagctcaaattattaaggcgatggaaaaaggcgatattgatgttacgaatgatgctaccggtacaatggcaaaagatgctaagtcatctaatgctggtctcaaggtattatctgcgccaagcttagactacggtttaataggattcgtatctcatgattacgataaaaaagctaataaaactggtaaagtgagaccaaaatatgaagacaaagaattacgtaaagcaatgctttatgcaattgatagagaaaaatggatcaaagcatttttcaatggttacgctagtgaaataaatagttttgtaccatcaatgcattggatagcagctgatcctaaggaactaaacgattataaatatgatcctgaaaaagctaaaaaaatcttagataagttaggttataaagatagagatggtgacggatttagagaagatcctaaaggtaataaatttgagattaactttaaacattattcaggttcaaatcctacttttgaaccaagaactgctgcgataaaagatttctgggaaaaagttggcttgaaaacaaatgtgaagttagtagaattcggtaaatataatgaagacttagcaaatgcatctaaagatatggaagtgtacttcagatcatgggcaggcggtacagatccagatccatcagatttataccatactgatagacctcaaaatgaaatgagaacagttttaccaaaatcagatcaatatttagatgatgcattagacttcgaaaaagtaggcattgatgaaaagaaacgtaaagatatttatgtaaaatggcaaaaatatatgaatgatgagttacctggattaccaatgttccaaggtaaatcgataactattgttaacgataaagtacgaaacttagacattgaaattggaactgatcaaagtttatataatttaactaaagaagcttagtaatgtaacctcgacgattttgtcgaggtttacttatatgggggatgttatgaataatgtattgttagaggttaaagatttagaaacctcattaaaaataaataatgaatggttagcaactgttgaaaatatttcttttgaattatctaaaggagaagttttgggtatagtaggggaatctggttgtggtaagtccatattaagtaagtcaattattaaattattaccagaaaagatatctaaactaagtaatggagaagttatatttgatggtaaacgaatcgatacgctcaatgagaagcaattgctagatattcgaggaaatgatattgctatgatttttcaagaacctatgactgctttaaatccggtatttaccataaaaaatcaactagtggaatctataaaatcacataaaaaaatttctaaaaaagaagcaaataacttagcaaaagatttactaaaaaaagttggaattgcaagacaagatgaaatattaaatagctatccccatcaattatctggtggtatgcggcaaagagtaatgattgcaatggccatttcatgttctcccaaattattaattgctgatgaacctacaactgctttggatgtcacgattcaagcgcaaatattagacttattaaaagaattgcaaaaggaaacgcaaatggcaattatgatgattacacatgatttgagtgtggttgctgaattttgcgataaagttttggttatgtatgcaggtcaaattgtagaatttggaggcataaaagaaatactacacaatccgaaacatccttatacccaaaaattattatctacaattccaaaacttaaagaagagcagaaacgacttgaaacgatagaaggaattgtgccatcaatccaagcatttcacgttaataagtgcagatttgcaaatagatgtaacaaaaaactggatatttgtaataatcaatctcctaaaatgcatgtttgtgaagacgtcattgtacgttgtcatttgtaccaaaatgaatataaggagatataagaatggaaaatattttagaagtaaatcaaataaaaaaatactacaaaattaaaactggattattacaaaaaactcagtacgttaaagctgttgatgacgtatcgttttcaataaaaaaaggacaaacttttggattagtaggagaatcgggttgtggtaagtcaacgttaggtaaagtgattatcaggcttgaagatgcaacttcaggctcaataattgttaatggtgaagatataacaaggttacaaggtaaaaaactgagaaaatcacgacaacaatatcagatgatatttcaagatccgtatgcatcattgaatccgatgcaaatggttggagatatcatttcagaacctattttaaattataaaaaattgccaaaagaagaaataaaaaaagaagtactatatttattaaaatgtgttggcctaagtgaagatgcatattataaatatgcacatgaattttcaggtggacagagacaaagagtgggaattgcaagagcattggctttgcgtccgagtttaattgttgctgatgagcctgtaagtgcattagatgtatctgttcaatctcaagtactgaatttattaaaagatttacaagaacaatttaacttaagctatttatttatcgcacatgatttaagtgtagtaaaacatataagtgatgtcattggagttatgtatttaggtcatatagttgaaatcgcatctgataaagaaatttatgaaaatcccaaacatccatatacaaaagcgttgatttcatcaataccacaaattgataagctaaataaaaatagaattatattaaagggagaattaccttcgccaagtaatccgccacaaggttgtcctttccatactagatgtccaattgctcaagatatgtgcaaaaaaagtatgccagaattaaaggacattggtaacgaacaccaagttgcttgtttctacgtagataaagtaggtgatttaaatgattaaattattacttaaaaggttagggttaatgatcccgttactaattttaatctcaatagttgtattttcattggcaatcatacaaccaggagatccattttcagatttacaaaacggtaaaataaaacaagaagcaataaatgcacaaagagaaaagttaggtctcaacgactcaataccacatcaatacattagatgggtcaatcatgttatacacggtgatttaggggagtcaatcaaatataaaaggccggtaattgatgttattgaggaaagaattccaaatacaatattactcggtgctatgtcattaattattacttatattatctcatttgctttaggaataacgtcaggtagatattcttacagtttgacggattatactgtgcaaatatttaattatttgatgttagccattccatcttttattgcgggagtatttgcaatttttattttttcttttgaattacaatggttcccgtttcaaggttctgttgatattaaccttaaagaaggcacttttgaatattatatgagtaaaatatatcacacatttttacctgcatttactttaggtttattatctactgctggttatattcaatatttacgtaatgatattattgaaaattctaaaaaagattatgtattgacggcaaggtcaaaaggattatctatgaataaaatttataataaacatatattgagaaattctctaatacctattattacatttttaggtgctgatattgtaagtattttaggtggagctgtgattacggagactatcttttcatataacggaatcggtaaattatttttagaatcggtaataggccaagactatccattaatgatggcattaacgttatttttctcatttttaggtttactgggtaatttgatttctgatattacttatggatttatagatccaagaattagaagtaactaggggggattagaatgcaaaataagtcaaaatcgccttttaaaattgcattgtctaaatttattcataataaaattgcaatgttatcgattatttttttattaatcataactattgtatcaattatagcgccattaatagctccttttccagtgaaccaacaagatttattaaatataaaaggtgaaatgacagcacaaaacattcttggtacagactctggtggtagggataactttagtcgtttgttatatgcaggtcgtatttcattatccattggaattacatctacaataggaatgcttttgattggaattacagttggagtgatttctggttattttggaggtattgttgatacattattaatgagaataaccgaatttgttatgttatttccatttttaatatttgcaattgtattaaatgctgcacttggagataaaattaaaaatccttatggatctgccataattcttgttctagttattatcgtattaagttggggaggtattgcaagacttgttcgtggtaaagtacttcaagaaaaagaaaatgaatactttttggcagcaaaatcaattggtacacccacatataaaattattttgaaacatcttttgccgaatatattaagtgtagttatcgtacaagcaacattgttatttgccggtatgattgtagtggaatcaggattgagttttttaggattcggaattagtaaagcaatcccatcttggggtaatatgttgagtgatgctcaagaaggggatgttataagtggtaaaccatggatatggatgccacctgctataatgattacattaactatattaagtataaactttgtaggggaagggcttaaagatgcttttaatcctagaggtagacgttaaataataaaagaggtactagttaattctagtacctctttattttatctcttacgtcctaaacccatcgctttttccattttcttgacagttttaaatgaaactttgtgtgctttatctctaccttgatctaaaatatcatcaagtttatctgagttatagaaactttcgtatttttcttggaattctactaaaaatgctttaactatttcagcaaggtcacctttaaatttaccataaccttcgccttcatattttgcctcaatatctttaattggcatgtctgttaatccagcgtatattgaaattaaattcgttatacctggcttgttgtcacgatcaaatttaataataccatctgaatcagttactgcgcttttaatttttttagctgcaacattcggctcgtctaataatgaaatgaagtttttagcattatcatcactcttactcatttttcttgttgggtcttgtaaactcatgacacgtccaccaactttaggcatacgaatttcaggtttcacaagcacatcattatagcggctattaaatctatctacaaggttacgagtcaattcgatatgctgcttttggtcatcgccaactggtacgatattagtattgtaaagaacaatatcagctgccattaaaggtggatatgttaatagaccagctggtataccttcaactgctttctgagctttatctttgtattgcgtcatacgctctaattctccaacagaagcaatcgtagttaacatccatcctgcttgtacgtgtgcagggacttcagattgtatgaacaatgttgctttgtctggatctataccagaagctaaataaatcgctgctaattgtctagtttgtttacgtaattttaagcgatcttgtggcattgtaattgcatgttgatctacgatacagaaataacaatcgtagtcattttgcacatcaacaaattgttttagtgcgccaatataatttccaatagtaggaattccactaggttggatgcctgaaaataatgtctccatttaaatgcctactttcttagtaatattttaataattatcattataacagtatttcttaaaaatgtaagatgtgttagaatatacgtataacttgctactaacaaagggattaataatcttttttataagtgtagaaacttatctgaaaaattaggtttttctcatttaattttaatgttagatagttataataaatagtaacgattaagaattttagaaaaaaatgttttttcttgatctataactaaattttaagcaatgaattttattcattcaaataggagagtgagatgtatggtaacattatttacttcaccaagttgcacatcttgccgtaaagcgaaagcatggttacaagaacatgacattccgtatacggagcgtaatattttttctgaacatttaacaattgatgaaattaagcaaatattaaaaatgactgaagacggtactgatgaaatcatttctacacgttctaaaacataccaaaaattaaatgttgatattgattcactaccattacaagacttatattcaatcattcaagataatcctggcttattacgtcgtccaattattttagataataaacgactacaagttggttataatgaggacgagattcgacgtttcttacctagaaaagttcgtacgttccaattacaagaagcacaacgtatggttgactaataaccatttaactatgtgtcatactttactaaaagatatgtcaagcaacgctatttctatagtgttgcttttttggttttaattttacaataattgcttagtatcttttaaatcaaatgtgcaattgttaatatagctctatattagagtgttttggatgaaacatttgctatgataaggtaaaattaaattaagaaagtgctttaatgctttaactgtataaatcatttaaatagttttgctacaacgaatatgttattataagttaccaaaatattttagagaaagaaatcaaacaaatatattgtattttgtttgatgctttaatacaatgtggatactattcatcgactgtaaggagtgagatgatatgagaatagaacgagtagatgatacaactgtaaaattgtttataacatatagcgatatcgaggcccgtggatttagtcgtgaagatttatggacaaatcgcaaacgtggcgaagaattcttttggtcaatgatggatgaaattaacgaagaagaagattttgttgtagaaggtccattatggattcaagtacatgcctttgaaaaaggtgtcgaagtcacaatttctaaatctaaaaatgaagatatgatgaatatgtctgatgatgatgcaactgatcaatttgatgaacaagttcaagaattgttagctcaaacattagaaggtgaagatcaattagaagaattattcgagcaacgaacaaaagaaaaagagtcacaaggttctaaacgtcaaaagtcttcagcacgtaaaaatacaagaacaatcattgtgaaatttaacgatttagaagatgttattaattatgcatatcatagcaatccaataactacagagtttgaagatttgttatatatggttgatggtacttattattatgctgtacattttgatagtcatgttgatcaagaggtcattaatgatagttacagtcaattgcttgaatttgcttatccaacagacagaacagaagtttatttaaatgactatgctaaaataattatgagtcataacgtaacagctcaagttcgacgttattttccagagacagctgaataacgatattaattaagcaacgcactatgaaaggagactctttggagtctctttttttattgatttcaaaagctgaaaaagtaatagtagttaaacttacgtgtaatattttgaggtgaagatatgttagtagctttaaatgaagaaaaggaacgcgtgttagcaactactgcattgagaaagacacaatatttttgtccggtgtgtggcaagcaagttattttaaagcgtgggctcaaagtaattagtcattttgcacataaacatttagcggaacaaaaatgttttaataatgaatcgattaaacattataaaagtaaattgattttagcacagatgatgcagcaacaaggatgtaaagtagagatagagccatttttaaaagaaataaaacaaattccggatattttgattaataataaatatgttattgagctacagtattcgccaattccttataaacagattcttcaacgaacggaaggtttaaagaaaatgggatataaagtaagttggttattaaatgatgttgattattgtcataataaagtgaagttcaatcattttcaaagtatgtttattaatccaatcactcgaaaacttcatacgttcaatttagagaaaaaacaaataatgatgtttcaacaaatacaatatataggcgggcacaaatatgtcgctgaaaaagggaatgccaaaattagtgagttgtttaatgaggcgccttgtgattatcatgctgtttataaattatcaaaattcgcaattaatcaatatatcaaatattgtcgctggcaaaattctgttttagaacccactttaagtgcaatgtatcagttgcatttaactgatcaagaagtagtgcacaattatggttatatttttccagagcaaatttatattgaaaatcatccaattgagtggcaattacaagttgatttatggttaaagaatggaaaaagcaaattagtaagtgacaatcttaattattttaaactgaaaaagtttattgttgctctagaaagtaaaacagcaattatagaaaaacttattaacaattatttaaaaattagttcagatagaggtaatgacgtgcaaattttgttctaaaatgagaaaattatatcaattatattttattaggaggtttactacatatgagtcaacaattatcgagagaagaacaggaacgtaaatatcctgaatatacatgggacttaacaacaatttttaaagatgatgaagcttttgaggctgcatttaaagaagttgaaaatgagttaggcaaagaagaacaatttaaaggacacattggtgatagtgctgagacattatacaatgcgttagaattagaagatacattaggtactaaattagaaaaagtatatgtatacgcgcacctaaaacaagaccaagatacaacgaacgacaagtatactggtatggagtcaagagcacatcaattaattattaaatttagctcggcgtggagtttcttagtgccagagattttacaaattgatgaagataaaattcaatcatttgtaaattcatatgataaattacaaaaattcgcatttgatttgaagttgattaacgaaaaacgtcctcatattttagatgctgaaactgaaaagttattaacagaagcgcaggacgcgttatcaacaccatcaaatgtatacggtatgtttagcaacgctgatttagtatttgaagatgcgattgataaagatggaaatgcacacccgttaacacaaggtacatttattaagtatttagaatcagatgatcgcaaactaagagagagtgcttttagaaatgtatataaagcatatggtgctcataataatacgcttggcgctacgctagcaggtgaagtgaagaaaaatgtatttaatgctcgtacacacaattacaaaactgcaagagaaaaagcattgagtaataatcatattccagaaaatgtatatgacaatctagtaaaaactgtacataaatatttaccattgctacatagatatactgaattgcgcaaagaattgctaggtttagatgacttgaaaatgtatgatttatatacaccattaattaaagatattaagtttgaaatgccttatgaagaagctaaagagtggatgttaaaagctttagaaccaatgggtgaagaatatttaaatgtagttaaagaaggcttaaacaatcgttgggtcgatgtctatgagaataaaggtaaacgttcaggtggctattcatcaggtgcacatttaactaatccatttattctacttaactggtctaatactatttcagacttatacacattagttcatgaatttggacattcagcacatagttacttcagtagaaaattccaaccgtcaaattctagtgactacactatttttgtcgctgaagtagcatcaacttgtaacgaagcacttttaagtgattatatggataaacatcttgatgatgaaaaacgcttattattattaaaccaagaattagaacgtttcagagctacattattccgacaaacaatgttcgcagaatttgagcataaaattcatgcaattgaagaagcaggtgaaccattaacgccaactagaatgaatgaagaatatgccaaattaaataaattatacttcggtgattctgtagaaactgatgaagatattagtaaggaatggtcacgaattccacacttctatatgaattattatgtatatcaatacgcaactggttacagtgcagctcaaagcttaagtcatcaaattttaacagaaggtaagccagcagtagatagatatattaatgaattcttgaaaaaaggtagctcaaattatccaattgagatattaaaaaatgctggtgtagatatgacaacacctgaaccaattgaacaagcttgtgaagtttttgaacaaaaattgaacgcttttgaaaaattaatgaaagcttagcgctattgtattcgcttacattatgaacagattgtgacaatttaaattaagtactattaaaaggttgaaatggaagagatagcgtgttatattatgaacatgaaattaatcacataacaaacatacccctttgtttgaagtgaaaaatttctcccatcccctttgtttagcgtcgtgtattcagacacgacgtttttttatgttcttttttaataagagggaagtgaagttgtataaaaatgtattaaatatgcactttttatacattaacgattaatatatgtctattatgtaccaaatttataatttgtataattttcgaactggttaaattcgaaaaacatcactaatatatttagatcgatgcgtaacattacgttctaataatttaatgttgcaaaattaagagtcaataaaaagacctcgttacatttatggtgtacgaggtctttaatttatttattttgatttgattttaggcattttagatttccagaaatcgccatctggatatttaagtttttcaattttttgttgaatggctaacttctttaactctttgtttaaaagtttttctggccattcataaatagtaagtaattcttccatcgttacaagttgttgttgctgtatataagtttctaatttaggaggaagattcttttcgataggtttacccatcaattcattaattatataagtatagatgtgataagggtataatccttcgacttttaaaccttcttcatgaacatcttcactaaagaaaacgagagaaggggcttgttcgatttccatttctcttgcaatatgcaaatcaattttcaagctttcagttagtttacttttttgtaagtcgtctttaaatacttctaaatcaatacctgcattttgaatacagtcacaaatcattgattctgtaataatatctcttttaggtatgatttcattttgcattaaatgtataaatcgttcggcacgtacacgaccttgtaactcagctgctttataagctagggcgatgttatcaaagttggatgtactttgagcttggcatttcgttaatacttttaacgaaggatttaatatatgtctgatacgtatatattgattatattcaattcttaatttggataagattgctgataatttgaagcaatcggagctaaatggatcgaaaaatgaataaatttcgattttacttacaggtgatagattaatatcttcacgactcttattttccattattcgtaattctccagccatgtttattcacctacaattaattttaggaattcaccatatgattagcagttaatcttaagcgctcaaataaataatctccaacaccttgtggaaacgcagcgcgattaattgctgtctgcatattttctaaccatgcatctctttcaaattcagtgattgtaaacgccatatgtctttttcttagcataggatgtccgtgttcttcggtataaatgtttggaccgcccaaaaactgtgttaaaaattgtttttgtttacgacttgtttctgcaaaatctcctggaaacaggtgattaagtcgttcatctttttctacaagggtgtaaaaataatcaatcatatcgtataacgcttctttaccaatgatgtcatatggtgttgttgtcatttaatcacccattttcaaaaatttactgttacgaacttaagttaatatataactaatataacatgattttaaacatttgaaagaaatatgcatatttgccaatttaatttatattgtttgaaagtgtttcttttttcttaaaaaaacgttgaactttatttaaaggttgatgatgttcgaggtttagttcgtttaataaagattggaacttttgtgaaccttgattatagtctttaacttcgaactctaactcataatccgtagtatcgaaatactcacttttatctaaaacaagtaaatcacctttatatttagtttcttggcgatatgtcgttaatgcgccaagtattgataaagttgtatcctttacaccaaactgttcaactataatttgacgaatgtcatctggaagattgtcgtttgaaataatcaagttcatctctggtttaatgtcgacgatatagttgtattctattagaccaacctttgctggtgtctttaaagtcatttcatattgattgtctttaactcttatgcgtagtgcagagcgatgttcctttaatttgaaatcgggtgtatcaatatagtaattgacttgcttaaacagcacactgtctttaaaatatttctcttgcaatttattatagattgatgcagttatcatttgtttaaattctatttcatgatttgttgccatgatatgtatacacctcgtatcaaattcaatttatcttaactatattatgaatgacaaagttgaattttaaaagtaatttcctttatctattatcaatgttaatttgaccattaaaaatagtgttcgtaagtgttttgtattattgaattgtgttaaaatgttatggaataagaggaggattaagcatgcgtttatatattaatgaaattaaaattaaagatgacacactttattgttatacagaagattctattaaaggattatctgaagtaggacaaatgctcgttgatagtgataattatgcctttgcgtatacattagatgatggtaaagcgtatgcttatctcattttcgtacaagaaacatggacgatgttgcatgaaaacatgactaaaaaaattattatcaatgatgaactagaattgactgaattccaccaagaacttacttatattttagacaacataaaaggaaataataattatggtaaggaatttgttgcaaccgttgaagaaacattcgacattgaataaagcggggtgaagcactatgaatcaatgggatcagttcttaacaccttataagcaagcggttgatgagttgaaagtgaaacttaaaggcatgcgcaaacaatatgaagttggtgaacaagcgtcgccaatagaatttgttactggtcgtgttaaaccaatcgctagtattatagataaggcaaacaaacgacaaataccatttgataggttaagagaagaaatgtacgatatcgctggtttaagaatgatgtgccaatttgttgaagatattgatgttgtcgtcaatattttaagacaaagaaaagattttaaagtaattgaagaacgagattatattcgtaacactaaagaaagtggttaccgctcgtatcatgtcattattgaatatccaatcgaaacattacaaggccaaaaatttatattggctgagattcagattcgtacattagcaatgaatttctgggcaacgattgaacatactttacgatataaatatgatggtgcttatccggatgaaattcaacatcgtttggaaagagcggcagaagcagcgtatttacttgatgaagagatgtctgaaattaaagatgaaattcaggaagctcaaaaatattacacgcaaaaacgttctaaaaaacatgaaaatgattaacgaggtgttataaatcatgcgttatacaattttaactaaaggtgactccaagtctaatgccttaaagcataaaatgatgaactatatgaaagattttcgcatgattgaggatagtgaaaatcctgaaattgttatttcagttggtggtgatggtacattactacaagcattccatcagtatagccacatgttatcaaaagtggcatttgttggagttcatacaggtcatttaggattttatgcggattggttacctcatgaagttgaaaaattaatcatcgaaattaataattcagagtttcaggtcattgaatatccattgcttgaaattattatgagatacaacgacaacggctatgaaacaaggtatttagcattaaatgaagcaacgatgaaaactgaaaatggctcaacacttgttgtggatgttaacttaagagggaaacactttgagcgatttagaggcgatggattatgtgtatcaacaccttcgggttcaacggcttataacaaagcgctaggtggcgcactgatacatccttcacttgaagcaatgcaaattacagaaattgcctcaataaataatcgtgtgtttagaacggtaggatcaccacttgtattaccaaagcatcatacatgtttaatatcaccagttaatcatgataccattagaatgacgatagatcatgttagtatcaaacataaaaatgttaattcaatacaataccgtgtagcaaatgaaaaagtgaggtttgcacgttttagaccattcccattctggaaacgtgtacacgattctttcatatcaagtgatgaagaacgatgaaatttaagtatcatatatcacaacaagaaactgttaaagtttttttagcacgacatgatttttctaagaagacagtgagcgccattaaaaataatggcgctttaattgttaatgatgaaccagtcacagtgcgtaagcaattaatgccaaatgatatattagaaattcatttaccgcaagaaataccgagtgttaatttaataccttacgctcgtaagctagaagtattgtatgaagatgcttttatcatcatagttactaaaccaaacaatcaaaattgtataccttcgagagaacatcctcatgaaagtttaatcgaacaagtactatatcattgtcaggtacatggtgaaaatattaacccgcatattgttacccgtctagatcgtaatacaactggtattgtgatattcgctaaatatggacatatccatcatttattttctaaaggaaacttgaaaaaaatatatacttgccttgtatatggtaaaacccattcatctggtattattgaagctaatattagacggtcaaaggatagtattataactagagaagttgcctcggatggtaaatacgctaaaacatcttatgaagtaataaatcaaaatgataaatatagtttgtgtaaagttcatttgcatacgggacgtacacatcaaattcgtgtacattttcaacatattgggcatccaattgtgggagattctttgtatgatggttttcatgataaaattcatggtcaagtactgcaatgtacgcaaatatattttgttcatccaatcaataagaacaatatttatattacaattgattataagcaattacttaaattattcaatcaactctaattcacacagggggtgtaagtatgtcaatgaacacagatgaaaaagagcgtgttcaagaggaattatatgatgagacattattagatcaatacttagaaaatgatgatattgatcaatttagagatgaatttctagcattacacacatatgaacaaggtgagtattttgaagatactaccgatgaaaatagacaaaagatttttcaatatttatcacctgaagaggttgcaaatttctttgatcaattagatattgatgacgatgaatatgagttgctatttgataagatgaatgcgacatacgctagtcacatattagaagaaatgtcatacgataatgcagtagatattttaaatgaattgactaaaccaaaagttgctagtcttttaacattgatgaataaagatgacgcgaatgaaatcaaagcgctacttcactatgatgaggatacggccggcggtattatgacgacggagtatttatcacttaaagcgcatacgcctgttaaagaagcgttattattggtcaaagcgcaagcgccagacgcagaaacaatctatgttatctttgtcgttgatgatgatggtaaattagtaggtgttttgtcgctaagagatttaattgtagctgaaaatgatgcttatattgaagatattatgaatgaacgtgtcattagtgtgaatgtagcagacgaccaagaagatgttgctcaagttatgagagactatgatttcatggccgtacctgttatagattaccaagaacatttgcttggtatcatcacgattgatgatattttagacgttatggatgaagaggctagtgaagactactctcgtttagccggggtttcagatatcgattcgactaatgattcaatcattaaaacagcattaaagcgtttaccatggttgattattttaacatttttaggaatgattactgcgacaattttagggagattcgaaaaaacattagaaaatgtagcgctactcgcagcgtttattcctattattagtggtatgtcaggaaattcaggtacacaatctttagccgtttcagttcgtaacattacgacaggggaaattaatgagcaaagtaaatttagaattgcattaagagaagcgggaagtggtgtattatcgggtgttgtatgttcaacaatattatttacaattattgttgcaatatatcatcagccacttttagcattaatcgttgcaggaagtttaacttgtgcgatgacggtggggacgtttgtaggttcgatgattccattattgatgaataagttgaatatcgatccagcagtggctagcggaccatttattacaacaattaatgatattattagtatgttgatttattttggtttagctacatcatttatggcttacttaatttaaggaggagttatggagtttttatctttagttattgttgttttagcagcgtttttaactccaataattgtcaatcgattaaatattaatttcttgccagttgttgttgcagaaattttgatggggattgtgattggaaattcatttctaaatatagtagaaagggattcaattctaaatattttatcaacgttaggctttatctttttaatgtttttaagtggtttagaaattgattttaaagcttttaaaaaagataaacgcgcacgtcaaggacaaaatgatgatgaatcctcaattccagggcatcttaatctagcgttaactgtatttgcatttattatgattatttcgattcttttagcgtatgtatttaaatggcttggattagtggatgatgtgttattaatggtgattatcatttcaactatttccttaggcgtagttgttccaactttaaaagaaatgaatattatgagaacaactatagggcaatttatcctattagtagcagtacttgcggacttagtaactatgattttattaacggtctatggtgcaatcaatggtcaaggcggcagtacaatatggttaataggtatattagttgttttcacagcaatttcatatattttaggtgttcaatttaaaagaatgtcatttttacaaaaattgatggatggtacgacgcaaatcggtattcgtgcggtgtttgcattaataatattattagtagccctagcagagggagttggcgcagaaaatatattaggtgcattcttagcaggtgtcgttgtttcattattaaatccagatgaagaaatggttgaaaagttagactcatttggttacgggttctttattcctattttctttataatggttggtgtagatttaaacataccttcattaattaaagaaccgaaattactaattatcataccgattttaatcgttgcatttatcatttcaaaattaattccagtcatgtttattcgacgttggtttgatatgaaaacaacgattgcatcagcatttttattaacatcaacattatcgctcgtgatagctgcagccaaaatttcagaaagattaaatgctatttcagctgaaacgtcaggtatattaattttaagcgcagtcattacatgtgtattcgttccgattattttcaaaaaactgtttccagttccagatgagtttaaccgtaaaattgaagttagtttaattggtaaaaatcaattaacgattcctatagcgcaaaatttaacatctcagttatatgacgtgacattatattatcgcaaagacttgagtgatcgtcgtcaattgtcggatgatatcacgatgatagaaattgctgattatgaacaagatgttttagaacgactaggtctgtttgaccgagacatagttgtttgtgccacgaatgacgatgatattaaccggaaagttgctaaattagccaaagcacatcaagttgagcgtgtcatttgcagacttgaaagcacaacggacgatacagagttagttgattcaggtattgaaattttcagtagctacttaagtaataaaatcttattaaaaggtttaattgaaacacctaacatgttgaatttattaagtaacgttgaaacgtcactatatgaaattcaaatgttaaattataaatatgaaaatattcaattacgtaatttcccattcggaggagacatcatcttcgtgcgtattatccgtaataatgagtcgattgttccgcatggagatacacaattgcgatatggagatcgcttaattgttaccggtgctaaagaatacgttgatgaattgaagcaagagttagaattttatttttaacaataatgatattaaaatgcagacgtattttagtacgacgtaaaattaatgattttaaaatgctagtatgtatatgattttgataaatacatgctttttacgtaaatcaagtttgatacagaaaggactaaatcaaacatttatcgttgtaatacgtttaaataactttattaaaaagtcataatagtgttaaaatgtattgacgaataaaaagttagttaaaactgggattagatattctatccgttaaattaattattataaggagttatcttacatgttaaatcttgaaaacaaaacatatgtcatcatgggaatcgctaataagcgtagtattgcttttggtgtcgctaaagttttagatcaattaggtgctaaattagtatttacttaccgtaaagaacgtagccgtaaagagcttgaaaaattattagaacaattaaatcaaccagaagcgcacttatatcaaattgatgttcaaagcgatgaagaggttattaatggttttgagcaaattggtaaagatgttggcaatatcgatggtgtatatcattcaatcgcatttgctaatatggaagacttacgcggacgtttttctgaaacttcacgtgaaggtttcttgttagctcaagacattagttcttactcactaactatcgttgctcatgaagctaaaaaattaatgcctgaaggtggtagcattgttgcaacaacatatttaggtggcgaattcgcagttcaaaactacaatgtgatgggtgttgctaaagcgagcttagaagcaaatgttaaatatttagcattagacttaggtccagataatattcgcgttaatgcaatttcagctggtccaatccgtacattaagtgcaaaaggtgtgggtggtttcaatacaattcttaaagaaatcgaagagcgtgcacctttaaaacgtaatgttgatcaagtagaagtaggtaaaacagcggcttacttattaagtgacttatcaagtggcgttacaggtgaaaatattcatgtagatagcggattccacgcaattaaataatatcattcaacagctttgttcacgttattatatatgtgaccaaagcttttttttgcctttataataatcggactgatggaaaattatttgatatttcatctgactgatttttttatgcacaaaaaattgcctcaaaagctgtagtttcaacttttgaggcgatagtatcttatattattaaaagacatccacagaattagtccttaacattactgtttgctttatcaataatgcgttggcggtatttgaaaatattactaacaaccgttttaagtacagcatataatggcactgcaatcagaactaatgtaaagccacctaaatctcctgctgctaaaataacaacgataattgttaaaggatgaatacttaaagatttacccattacatttggtgtaatgatattaccttcaagttggtgtgcaattaatgtaatgatacaaacccatataaatgtagtaggactatctataataccgagtattgctgcaggtgcaaatgataaccatgaacctaagaaaggaattaagtttgcgacaccagcaaatagtactaataaaggaatatatggtaagtcaataattgaataaccgatatataagaatatacctaaaataacactgacagttacttgaccttgaatgtaagattttaatgtaaagtttaaatcagttaataaatctacgaaaaatactttacgttcacctttgaaaaatttagcaacagctgggataaatttttcatggtcttttaacatataaattaagaagaatggaaccataatcaataagaagatggttgaaattaatgatgtaatgtactgtaatgaattagataaaatattagtaacgccatcacccattgatttaaccatatttgtaattctacttgttacatcttcaggtaatttatccatttgagctagtgcgaatttaataatttgctctgcttctttttgtagggcaggtgtttgactaattaaattgttgatatttgaaatgatgattggtgcaacaaacgcaacaattaagccgataatagcaaacaaagctaacatgattgttgttatactagcccatcttggaaaaccgactttttcaagtaagttttgaaaaggtagacagatataaaataaaaaaccactaattaaaaatggaagaaatacagaaccgatgattgtagctattggagtaaatacttcgtgcacttccataaatagtttgatgagaatgaacagcataatcagagagatgccagttcggaaccaaaccttgtttaacataaacgatgttcctcctatttttctaaacttagttattatttagtatatcctaaatagcagtgcttaaaaaggttaatattttttaaatatacttaaattaagcattcactttctattttaagatatttactttcaatagtttgtgagacttttcaatgactcgtaagtctgcaaatggatcaagcagtaccaatttatatgaataacttattttaatagtaaacgtgtttaaataatgaaatgatcatattattatttataagaatattctgaaaaatatattgaagtgtctcgtgcttaatcgtataatatttttatgtttaaacaatagggggaatcttatgattgaaaaattagtaacctttttaaatgaggttgtttggagtaagccattagtttatggtttgctaattactggtgtgctatttacattgcgtatgcgattttttcaagttagacattttaaagaaatgattcgattaatgtttcaaggagagaagtctcctaatggtatttcaagttttcaagcgatagccatgtctttagcaggcagggttggtacaggtaatattgtcggtgtatctactgcaatatttataggaggacctggtgcagtattttggatgtggattactgcgtttttaggtgcaagtagtgcttttattgaatctacacttggtcaaatattcaagagagttgaaaataatgaataccgtggtggaccagcgtattatattgaatatggtattggtggtaaatttggtaaaatttacggaattatctttgctattgttacgattatctcagtaggtctgttgcttcctggtgtgcaatctaacgctatagcaagttctatgcacaatgcgattcatgttccacaatggttaatgggtggtattgttgtagttgttttgggattaattatttttggtggtgtacgtagtattgccaatgttgcaacagccgttgtaccatttatggcaattatttacatactaatggctgtcattatcatttgtatcaatatacaagaagtgccagcgttatttgcattaattttcaaatcagcatttggattacaatctgcttttggtggtatcgttggcgcaatgatagagattggtgttaaacgtggattatactcaaatgaggctggtcaaggtacaggtccacacgcagcagcggcagcagaagtatcacatccaagtaaacaaggtctagtacaagcattttcagtttatattgatacattatttgtatgtactgcaactgctctgattatacttatttctggtacatataatgtgactgatggtacggttaatgcgaatggcacaccgcatttaattaaagacggtgggatttatgttgaaaatgcaacaggcaaagattattcaggaactgcgatgtatgcacaagccggcattgataaagcgttccatggcagtggttatcaatttgatcctactttctctggtgtaggttcgtactttattgcatttgctttattcttctttgcatttactactattttgtcgtactactacattacagaaacaaatgtcgcttatttaacgcgtaatcaaaataatcaagtttcatcggtatttattaatattgcacgtgtgattattttgttcgctacattttacggtgcagttaaaacagctgatgtagcatgggcattcggtgatttaggtgtaggtctaatggcttggttaaatatcattgcgatttggattttacataagcctgccgtaaatgctttaaaagattatgaaattcaaaagaaacgtttaggcaacggttataatgcagtttatcaacctgatccgaataaattacctaatgctgtcttttggttgaagacatatccagaacgtttaaaacaagcacgtgtcaaaaagtaatctacttttgtttatagtatatgtagtgatcatttgataaaaaagaaaaagtattgagaattttaggtgctcagaaatttgaattttaaaatatagtgtctcttggtacaataataatacaattactagggggcacttttttatgttggaatttaaagctggaaagattaataaacatgttttatatagtgatattttaaatagagatgtcacactaagtatttatttgccagaatcttataatcaacttgttaaatataatgtcattctttgctttgacggattagattttttacgtttcgggagaatacaacgtacatatgaatcgttaatcaaagaagcgcgtattgatgatgcgattattgtcggattccattatgaagacgttgataagcgtagagaggaatttcatccacaaggaagtcgttctcatttaactattcaatcagtcggtaaagaaatattgccatttattgactcgacgttttctacactgaaagtaggtaatgcaaggttattagtaggggatagtttagcgggtagtattgccttattaacggcgttgacctatccaacgatctttagtcgtgtagcaatgttaagtccacattcagatgaaaaagtattagataagctaaatcaatgtgctaataaagaacaattgacaatttggcatgtcattggtctagatgaaaaagatttcactttaccaacaaatggtaagcgtgccgatttcttaacaccgaatagagaattagctgaacaaattaagaaatataatataacttattattacgatgaatttgaaggtggtcaccaatggaaagattggaaaccattgctgtcagatatattattgtattttttaagtaaaaacacagatgatcaactttatgaataatttacattagtagatttagtatgaattgtcttcatatagtctggtctataatataatttataaaagattttactgtttaatttaatttaaatttgtcgaaattgcaaaagatgtataatgaattatttttaatgtaacggttttcaaagaaatttgatataatagcaataggttaaacaaaggaggaattcagatgattttaggattagcattaattccatcaaagtcatttcaagaagcggtggattcttaccgtaaaagatatgataaacagtattcacgaattaaaccacatgtgacaattaaagcgccatttgaaattgaagatggtgatttagattctgtcattgaacaggttagagctcgtattaatggtataccagcagtagaagttcatgctacaaaagcttctagcttcaaaccaacgaacaatgtgatttactttaaagttgcgaagacggacgacttagaagaattgtttaatcgctttaatggagaagatttctatggagaagctgaacatgtttttgtgccacactttacaatagcacaaggactatctagccaagaattcgaagatatttttggtcaagtagcattagctggggtagaccataaagaaattatcgatgaattaactttgttacgttttgacgatgacgaagataaatggaaagttattgaaacgtttaaattagcttaagtaacataatagtattgttaatcgtagtatgtttgaattaataagaaaatggtcatttttattgaatgtaataaaaatgaccattttctttattttaaaatacgttttaaccttacttagctttttctctatttgctataaagtagcttccataaaatacagctaagactaaaaagattaatgccgagaaataaaatgtattgtttaaattgttggtaaattgtgtaattaatccgccaaataatggcccgatcattgagccgaatccttggatactattaaaaacaccccaagtttcttcctgttcatctgatttgataaatcgtgccataaaggtattccatgctggtaataagatgccatacattagaccgatagctaaagcgataatccacacgatgtgaatattaacaatcatagatagagtaaaaattaatatcatgtataaaataaatccgcttagaataacactatacataaagtttctgctgcggttatctattagtttcgataaaaatagcatcgaaactgcacagccgataccaccaataatgattgcaacagtatattcaattgtgcttacgttaataaccttagtagcatatgttggtaatataggaactagggcagcaattgcggcaccttgtaaaagaataccagggaacaacaataaatggcgctttgtcacatcaacaatttgtctcaattgtgctttaactggacgagtattataatttgttaactttacatcgacaaaataatataatatccatgcaattaaaacgactaaagacatcatgaaggcaaagcgtgttgggtgcactttgataagtagattcataaaaaccatacctaccaatagacctaacaaccatgaaaaataaacatagcccatttgtttgccacgtttatcttcttcaacactggataacataatgacccaaataggactaactgcaataccgagcatcaaagcactaaatatgattacaaaaggtgatgctggaaaccaaataactaaaaataaacttgtaaatgctaaaataaatccagtcgttaaaacgatttttgtgccgaattttttcagtaaaaagcctataacaaagtttgtagatgcatcagcaataaaatgtattgaaaatgctagagacgttattgctacagcaatggatgtaactgttggcaagaaattaatatagcttaggatatacatgcctctcgcaaattccattaaaaataagataataagcattaaaatgaaatttttatgattagcgtaattatttaacgaagaatcttgcatataaaggaacctttccataaatctcttgtggttgtgatgaatgaccgattaaatcaagtaagtccctacatattgtctgtgtagcatacttaattttatcttgttccattgtactaatcatgttagttaattgctcattaccattcgttaaactagctacaatttttattgcttcttctggagtatcagcgattttaccaaaacctttttcttcaaagtaaagggcattttcaagctcttgaccaggtgcaggatttaggaaaatcattggaatacaacgggcgaaaccttcagttattgtgataccaccaggtttcgtaatcataagttgacttgatgccatccattcattcatgtgtttggtataacctagaatcaatacattctcgttagatttaaacttagctgttaaagaacgctttagctctttgctcttaccacaaatcataactacttgtgcatttgcacttttcgctaatatatcagtgatcatcgtgtcaaaacctttagatacaccaaatgcaccagctgacattaaaatagtttgcttatctggatctaagttgttgtctattaaccactgcttttgattaataggtgtttcaaatttgttatcaataggaatacctgtcactttaactgttgaaggatcaatacctacgtctatgaagtcttgtttcgtttcttttgttgccacataatatcttgttgaatacggcgtaatccagtttttatgtaagcgatagtctgtcatcactgtagcaactggaatattaatgttaaattgctcagttagtaccgacataactggtgtaggaaacgttaataatattaaatctggcttttcttttatcaataaattaattaatttattaagtccatagtatttgtagaaacatttgtctagtttatctgggcggctgtaataaaaccctttgtacatatttctaaaatatttaaagctattgatataccattttttacaaatagaagtcaaaattggatgagcttccataaataaatcgtgctcaatgacgcttaaatggtctagattcatatcattaagttgattaacgatactctgtgtaacttgcatatgaccgttaccgaatgagccagtaataatcaatatctttttattttgagtaaccattaatagccaccctccgttagtttgaaaattttatttaagtgtaacttattttacggcattataaaagaaataaagacgcaaagtcgttacatttatagcaattttaatcaatagttgaattgatacaaaataaaacgttattttataaagcaatttattgttctatgttttatttgtatatttaaaattatccagtatacaattatagcatatttttggaaacaattatgatattataccatgttacaagatggttttaataatttaagatgagccataattgtgaaactaattcataataccttaagttttatttttaatagtagaaattagaaaatgctgattagtaggatatatcagtgaaattataaatttattaacatcaacaaaacgtgtataataaacatattgtagaaaaaggagcggttcagtttggatgcaagtacgttgtttaagaaagtaaaagtaaagcgtgtattgggttctttagaacaacaaatagatgatatcactactgattcacgtacagcgagagaaggtagtatttttgtcgcttcagttggatatactgtagacagtcataagttctgtcaaagtgtagctgatcaagggtgtaagttggtagtggtcaataaagaacaatcattaccagctaacgtaacacaagtggttgtgccggacacattaagagtagctagtattctagcacacacattatttgattatccgagtcatcagttagtgacatttggtgtaacgggtacaaatggtaaaacttctattgcgacgatgattcatttaattcaaagaaagttacaaaaaaatagtgcatatttaggaactaatggtttccaaattaatgaaacaaagacaaaaggtgcaaatacgacaccagaaacagtttctttaactaagaaaattaaagaagcagttgatgcaggcgctgaatccatgacattagaagtatcaagccatggcttagtattaggacgactgagaggcgttgaatttgacgttgcaatattttcaaatttaacacaagaccatttagattttcatggcacaatggaagcgtacggacacgcgaagtctttattgtttagtcaattaggtgaagatttgtcgaaagaaaagtatgtcgtgttaaacaatgacgattcattttctgagtatttaagaacagtgacgccttatgaagtatttagttatggaattgatgaggaagcccaatttatggctaaaaatattcaagaatctttacaaggtgtcagctttgattttgtaacgccttttggaacttacccagtaaaatcgccttatgttggtaagtttaatatttctaatattatggcggcaatgattgcggtgtggagtaaaggtacatctttagaaacgattattaaagcagttgaaaatttagaacctgttgaaggacgattagaagttttagatccttcgttacctattgatttaattatcgattatgcacatacagctgatggtatgaacaaattaatcgatgcagtacagccttttgtaaagcaaaagttgatatttttagttggtatggcaggcgaacgtgatttaactaaaacgcctgaaatggggcgagttgcctgtcgtgcagattatgtcattttcacaccggataatccggcaaatgatgacccgaaaatgttaacagcagaattagccaaaggtgcaacacatcaaaactatattgaatttgatgatcgtgcagaagggataaaacatgcaattgacatagctgagcctggggatactgtcgttttagcatcaaaaggaagagaaccatatcaaatcatgccagggcatattaaggtgccacatcgagatgatttaattggccttgaagcagcttacaaaaagttcggtggtggccctgttggtcaataaaagacttattgatgaaggtaaaactattgatgtttatttattcgaagcattaaatgaccagataatcattgctataccagattggttttggtcatatcagatggcaatggcattagatgaagaaaattgttttgaagcaatactcatgcaattgtttgtttttaaagaagaggaagaggcagagtcgattgcatcacaactaacagattgtatagaaacatataaaaaggagaaagactaatgaacttaaagcaagaagttgagtctagaaagacttttgcgattatttcacatcccgatgcagggaaaacaacgttaactgaaaaactattgtacttcagtggtgccattcgtgaagcgggtacagttaaagggaagaagactggtaaatttgcgacaagtgactggatgaaagttgaacaagagcgtggtatttctgtaacaagttcagtaatgcaatttgattacgatgattataaaatcaatatcttagatacaccaggacatgaagacttttcagaagatacgtatagaacattaatggcagttgacagtgctgtcatggtcatagactgtgcaaaaggtattgaaccacaaacattgaagttatttaaagtttgtaaaatgcgtggtattccaatctttacattcattaataaattagaccgagtaggtaaagaaccatttgaattattagatgaaatcgaagagacattaaatattgaaacataccctatgaattggccaattggtatggggcaaagtttctttggcatcattgatagaaagtctaaaacaattgaaccatttagagatgaagaaaatatattgcatttgaatgatgattttgagttggaagaagatcatgcaattacaaatgatagtgcttttgaacaagcgattgaagaattaatgctggttgaagaagcgggtgaagcctttgataatgacgcgctgttgagtggagacttaacacctgtatttttcggttcagctttagctaactttggtgtacaaaatttcttaaatgcatatgttgattttgcaccaatgccaaatgcgagacaaacaaaagaagaggttgaagtaagcccgtttgatgattcattttcaggatttatctttaaaattcaagccaacatggaccctaaacaccgtgatagaattgcctttatgcgtgtcgttagtggtgcatttgaacgtggtatggatgttactttgcaacgtactaataaaaagcaaaagatcacacgttcaacgtcatttatggcagacgataaagaaactgtgaatcatgctgtagcaggcgatatcattggactatatgatactggtaattatcaaattggagatactttagttggtggaaaacaaacctacagtttccaagatttaccacaatttacgccagaaatttttatgaaagtttctgctaaaaacgtcatgaaacagaagcatttccataaaggtattgaacaattagtacaagaaggtgcgattcaatactataaaacattacacacaaaccaaattattttaggtgctgttggtcagttacaatttgaagttttcgaacatagaatgaaaaacgaatataatgttgatgttgttatggagccagtaggccgtaaaattgcacgttggattgaaaatgaagaccaaattacagataagatgaacacatcaagatcgattttagtgaaagatagatatgacgatttggtattcttatttgaaaatgaatttgcaacaagatggttcgaagagaaattccctgaaattaaattgtatagtttactttaacggctcaatagtataatcgaatttgtgactttaaaaataattgtttcgttgaagaaaaataaattgtatattttaaaagaaaaaggtatactatgatgtatcaaatgaataacctatggcattttgtcagaggggagtaacttaagaatcatgaccgtataaatgattcgacactttatcgtcattacgaagatatcttccggtaaagtgggcaatttaaattgcttagtgagacctttgctatttatttagcataggtctttttgtttgtacttaacttatttatttaaaggagttgtacatgttaatggatccaagtttgatcttaccttatttatgggtacttgtcgttttagtatttttagaaggcttattagcagcagataacgcgattgttatggctgtaatggttaagcacttaccacccgaacaacgtaaaaaagctttgttttacggtttgttaggtgcatttgtatttagatttttagcgttattcttaattagtattatcgcgaacttttggtttattcaagctgcaggagcggtttacttaatttatatgtcaatcaaaaatctgtggcagttctttaaacacccagaaattgaaagtcctgaagctggagatgatcatcattatgatgaatctggtgaagaaattaaagcaagtaacaaatcattctggggaactgtgttgaaaatagaatttgcagatatcgcatttgccattgattctatgcttgctgctttagctattgctgtaacacttcctaaagttggtattcactttggtggtatggacttaggtcagttcgtagtcatgttcctaggtggaatgattggtgttattctaatgcgttatgcagcaacatggttcgtagagctattaaacaaatatccaggacttgaaggtgctgccttcgcgatcgttggttgggtaggtgttaagttagttgtcatggtattagcgcacccagacatcgctgtattgcctgagcacttcccacatggcgtattatggcaatctattttctggacagtactaattggattagtaattatcggttggttaggttcagttgttaaaaataaaaaatcgcataaataattgatgtgaagcggacaatcttaatttagtttaaggttgtcctttttcatttaatagagtgacttatgaaaaatggattttgaagaatatgaatcaaaaggatgcgatatagcattaagaaaatgtgccttttatatttagcatttttttcaatagaaattatatagattttaaagcaaattaagtgttaatgtgtcataatgaaaagtgattttattgaatggagtggacattagtggatattggtaaaaaacatgtaattcctaaaagtcagtaccgacgtaagcgtcgtgaattcttccacaacgaagacagagaagaaaatttaaatcaacatcaagataaacaaaatatagataatacaacatcaaaaaaagcagaaaagcaaatacataaagattcaattgataagcacgaacgttttaaaaatagtttatcatcgcatttagaacagagaaaccgtgatgttaatgagaataaagctgaagaaagtaaaagtaatcaggatagtaagtcaacatataacagagatcattatttaacagacgatgtatctaaaaaacaaaattcattagattcagtggaccaagatacagagaaatcaaaatattatgagcaaaattctgaagcgactttatcaactaaatcaaccgataaagtagaatcaactaacatgagaaagctaagttcagataaaaacaaagttggtcatgaagagcaacatgtactttctaaaccttcagaacatgataaagagactagaattgattttgagtcttcaagaactgattcagacagctcgattcagacagagaaaataaaaaaagacagttcagatggaaataaaggtagtaatctgaaatctgaagtaatatcagacaaatcaaatacagtaacaaaattgtcggaatctgatgatgaagtaaataatcagaagccattaactttgccggaagaacagaaattgaaaagacagcaaagtcaaaatgagcaaacaaaaacttatacatatggtgatagcgaacaaaatgacaagtctaatcatgaaaatgatttaagtcatcatacaccatcgataagtgatgataaagataacgttatgagagaagatcatattgttgacgataatcctgataatgatatcaatacaccatcattatcaaaaatagatgacgatcgaaaacttgatgaaaaaattcatgtcgaagataaacataaacaaaatgcagactcgtctgaaacggttggatatcaaagtcagtcaagtgcatctcatcgtagcactgaaaaaagaaatatggctattaatgaccttgataaattaaacggtcaaaaaccaaatacaaagacatcggcaaataataatcaaaaaaaagctacatcaaaattgaacaaagggcgcgctacaaataataattatagtgatattttgaaaaagttttggatgatgtattggcctaaattagttattctaatgggtattattattctaattgttattttgaatgctatttttaataatgtgaacaaaaatgatcgcatgaatgataataatgatgcagatgctcaaaaatatacgacaacgatgaaaaatgccaataacacagttaaatcggtcgttacagttgaaaatgaaacatcaaaagattcatcattacctaaagataaagcatctcaagacgaagtaggatcaggtgttgtttataaaaaatctggagatacgttatatattgttacgaatgcacacgttgtcggtgataaagaaaatcaaaaaataactttctcgaataataaaagtgttgttgggaaggtgcttggtaaagataaatggtcagatttagctgttgttaaagcaacttcttcagacagttcagtgaaagagatagctattggagattcaaataatttagtgttaggagagccaatattagtcgtaggtaatccacttggtgtagactttaaaggcactgtcacagaaggtattatttcaggtctgaacagaaatgttcctattgatttcgataaagataataaatatgatatgttgatgaaagctttccaaattgatgcatcagtaaatccaggtaactcgggtggtgctgtcgtcaatagagaaggaaaattaattggtgtagttgcagctaaaattagtatgccaaacgttgaaaatatgtcatttgcaatacctgttaatgaagtacaaaagattgtaaaagatttagaaacaaaaggtaaaattgactatcccgatgtaggtgttaaaatgaagaatattgccagtctaaatagttttgaaagacaagcagttaaattgccaggaaaagttaagaacggtgttgtagtagatcaagttgacaacaatggtttagcagatcaatctggtctgaaaaaaggtgatgtaattactgaattagatggcaaacttttagaagatgatttacgctttaggcagattatatttagtcataaagatgacttgaaatcaattacagcgaagatttatagagatggtaaagagaaagaaattaatattaaactaaaataatgttgaggtgaacaacgtgtcaatttttagccagtttttaaaaagatcaagccctcaacaaggtattgtattgtactatatcgtcgcaattgtcgttgcatttttattattaaacttaccgtatgttcataaaccaggtgtagaagtaaatccaattgacacattatttgttgccgtatccggaattagtgttactggattgtctccgataagtattgtcgatacctattctacatttggacaattaattatcctcgtgatattaaatattggtggaattggcgtcatggcaattggtacgatgttatgggtggtactaggtaaacatattggaattcgagaacgtcagttaattatgttagataataacaaaaacacaatgagtggtaccgtcaaattgattattgatattgtaaaatcaatatttgtaatcgaactcgtaggagccatgttattagcattttacttttatcgagataatccagatttaaaatatgcaatcatgcaaggtgtttttgtttctatttctgccactaccaatggtggattagatattacaggtaagtcattaattccttatgcacatgattattttgtacaagcgatagttatatttttaataattttaggatcaatcggcttcccagtgttattagaagttaaagcttatattcaaaatagggttactaattttagattttcattatttactaaaattacgacatcaacatatttattcctatttattgttggggtattagccattctattatttgaacataaccatgcgttcaaaggattaagttggcatcaatcgttattctattcgctgtttcaatcagcgactacaagaagtgcgggtcttcaaacaattgatgtgacaacactaagtgaccctacgaatattatcatgggtattttaatgtttataggttcttcgccaagttcggttggtggcggtattcgtacaacaactttcgctattttaattttgtttttaattaactttagtaataatgccgataaaacatccattaaagtttacaatagagaagtacacattatggatattcaacgttcatttgcagtatttacaatggcgacaattttaacatttttaggaatgctaattatatcagctactgaaaatggtaagcttacatttttacaagtattttttgaagtcatgtctgcatttggaacttgtggactatcgcttggtgtcacaagtgatattagtgatatttccaaggtcgtactaatggtactcatgtttataggacgtgttggcttaatatcatttatcattatgatagcaggacgtcgagaaccagataaattccattatccaaaagaacgtattcaaataggataatataatagcaatctaagtttagttaatgtagattttaactggaacttagattgcttttttagtttgtatttttaacttattttataagacgattggttttgaaaatggtaaactagtaacaatgagaggtgtaacatgatggaaaaaaatgaaaacattaatgtagagattttaactacgtcagatatgcatagtcatttcttaaatggtgattatggttcaaatatttatagagctggtacttatgttaaccaagtaagagcacaaaatcatcgcgtcattttattagatagtggcggaagtttagctggctcgttagcggcctattattatgctattgttgcaccttataaacgacatccaatgataaagttaatgaacagaatgcattatgatgctagcggtgtgagtccaagtgaattcaagtttggtttatcatttttaactcgttcaattgctttggcacgttttccatggttatcagcaaatattgaatacaatgttactaaggagccatatttttcaactccatattgtattaaacattttggtgacttaaaaattgctatcgtaggcgtcacagcagatggtttaatggaaaatgagtattctgaaatggagcaagatgtatctattgaaaagacattagtggcctcaaaacgatggattagatatatccatgaagttgaagagccagattttttgattgtaatttatcatggtggattgaataaaattagtaatagcacgaaaaataaaaaggcaagttcgaatgaagctgaaaaattaatggaagaactcggtgttatagatttaatgattacagctcatcagcatcaaacaatagtaggtcaagatcatgaaacgtattatgttcaggctggtcaagatgcaaaagagcttgtacatctttcgattaattttaaaaagagaacaacaacttatgatgttgaaagtattgattctaaagtgattgacttaaatgagtatgaagaggatcaagaattattagatttaacattctatgatagaaaagcagtggcttattggtcacaggaaatcataagtgataaaggtttgatgttatcagtaaatgggttacaagatttagtctgtcaaacacatccattttcgcaattattacatgatgcaattcaccttgcatttgataatgatataacatgtgtccacgtgcctatgaacggagagaaggggttgagtggacagattcgaaatgaagatttgtatcatgcatacccatatccagataagccaatggatatgacaattagtggtcaaaatatcaaagatatattggagtatagttattcacatttagattttgttaacgagcaattaagcttaacaattattgatgaaacattatgtacaatgtggcaaggattcaattatgaaattgatatgaatcaagaacctgggcaacgagtaatgttagatcaaattgatttgactaagagttatagagttacaatgactgactattgttatcgtaactacaagaattatttgaaaaatgctattatacatgaatcatacgatgaaacaatgagtacattaattgcagagaagttaagagatccgaattatcgtatttcatgtagtgataattttgtagttaaaaacaggtaaatattgctatgtaataaattaattataagtttaacaagtataaaaacctttcttagagaagattatctaggaaaggtttttagaattttaaaattgatataaaagaacagtgaaattctcattcattatatatataagtaaacaaaaaagcttaaatggtatataccatttaagcaagtaacggaaacggagggattcgaaccctcgcgccgctttcgcgacctacacccttagcaggggcgcctcttcagccaacttgagtacgtttccaatggctccacaggtaggactcgaacctacgaccgatcggttaacagccgatagctctaccactgagctactgtggattaatttgtatgtgtttgaatatcaagcacaaatattattataacaagattaagttaatttgcaatagataccttaaaaaaatatgcagaacatttacactatatttataaaacattccgcatattttaaaaataaacaatttatttatcttcaaataaagaatagcgtgtcaatgcttcaaacacattcaatgtggctttattataatctattggttggtcgggattttttgatatcatgcgagattgtttatctaccatgtaatagtaaaaaatggaattgttatattgatgccataaactgtggtatgaaacatgaagaatgattgattcattattaataaatgtcactttacatttacgattttttaattctttaatactttcgatataatgcatatttaaccaaatattttcattttgtctgtcagaatgtgttgggaaaaaataagttggaaataatggtgttagtaaaataggtggtttactagaaatgccagtaatgcggtttgtctctgctttcttgccaagataagtattaccataaaatttgcaagagcgttcaatgattttctggactttaaaaggattttgaatacgcgttttgtcaaaccgaattatttcgctaccatttctttgatcgtcatcatcaaatgctggtcgaataaccatgtctcctttgcgtatcacataaatattttgagaatacataagcaaaacctcgctttattaagttttaaaccattaatataaaaatacaattaatgatataaagatattttataataaaattctgagttgtcaagttattattttggtgaaaatgtacaatattttttaactaatagtcagaatattcattgatttcaaaattagaaaaatgtatacttattataaattaaagaaaggtagtggtttctatgaaatacaatactaatgttaaacatacaactttagaagcgtttgtcacaaccgtcaatgatttgggtattgaattaattatcaatgaagcacttcgagaggtaagaaaacgacagctcatagaacttatagatgacgcactcgtcaataaagatgaagcagcatttaatcaatatacggcagaatacaaaaatttggaggcatttctcggtgaataacattgattcgaattccataacgcaatcataaaaggactattcttaacatctcatacatgtaagaatagtcctttaatcgtttatgacattaatctaattaattcatgtctatctatgtcaccgaaatagtgatttaaatcatattctgatagtgcttcttctatgtgctcaaagtcgtgtagacagccaactaatgcattttcaagatcagtgacatctccgacaccaaagaaatcaccgaaaatttttgcatgttcgattttacctcgtttaacatcaaacttaatttgtacaaatcctttttcaaatttttcctcgcgttcaaagttatatttagggtttctaccataattccattcccaagttctatatttgtcgttacttaacttttcaatattttcccaatcttcatctgttaatttatattcttctacttcagcttctccaaagatagttttcaagatgatttttttaaattcttcaatttctaaagggtcatttaaaaattcttgaatgtttgctactcgtttacgaacagatttaataccttttgatttaatcttagctggattaacttttagtgcattctgaacttcgtctaaatcactatttaacatcaacgtaccatgactaaacattctatttttaactttaaccatggcatttcccgagattttcgcttgtccaacttgaatatcgttacgaccagttaattcagcatttacgcctaaagattgtaatgcttgaacaattggttcagtgaatttttggaaattgtggaaactgttaccatcatcatctgttataaaactaaagtttaaattgccagtatcatgataaacagcgccaccaccagaaattcttcttactacatcgatgttatgagcatctatatatgtctgatttacttcctctatcgtattttgattctttccaacaatgatagatggtctatttatgtaaaataaaaagtaactttcttctgctggtaaattttttaaaacatattcttccattgctaagtttaaagttggatctgtaatattattattactaatgaatttcattacaatctctcccttatatctatatatattctctacttatttatgccttaactttgctcaaaatgccaattatatactcacaaatcattctaaatatcggcttaaagttacattttattatttttgattgttaatagtttatttgttaagtgaattttagtacaatataatttagttatgatttaaggaggacttaaaatgactgttgcagaagtgggtaacattgttgagtttatggatggattaagaggtcgtgttgaaaaaatcaacgataactctgttattgttgacttaacaattatggaaaattttaatgaccttgatttaccggaaaaaactgttatcaatcataaacgatataagattgttgaataagaaggtaagttataatgaataaaatctcgaaggctttaacttggtttattataagtttcattatatttcatctcatattatttattatgtggggcgaacaccaagaatactggtatttatatacaggtataatgctaattgctggtatcagttatgtattttatcaaagagatattgaatctaagaggttgcttacatcaattggtgttggtattattacggcaattattttaattatgcttcaacttttattctcacttataacatctaatttaagttatagttcattaattaaagaattagcaagaacaggtgtcaattggaagtggcaaatgttagtaactttactttttgtcattccatgtcacgagttatatatgagaactgttttacaaaaagaattaacacatttttcaataccgaaatgggtagctatattaataacagcaatttgttctagttcattatttatttatttagataattggtggatagtaacatttatatttgttgcacaagtgatattatcattaagttatgagtatactcgacgtatagcaacaacatccgttgcacaaattgtagctattatattgttattaatttttaatgcttaaataagcttttcttagacgtatgtgttctaagaaaagcttttttgcttaagaaaagcactacgaagattcaaggcttgctttattatagtgtatacatttttaacggcaagcagttattattgaggttatattttagtcagttttttattactaaatattttataaaaatggtataatattttgtgggcaagttgaattgatggtggctatctgagtaaagggggggtggtgcctatggcattacttaacacttttgaaaggaaaagcctattgtgatatctattgcaaacgcattacatttaatgttaagtttcggtatgtttatcgtcactttcattggtatagtagtcgcaataataaatttaagcaataaaaaataaccatcatttcaaaactttgacatagaatgatggttaaagaaaatctcatttagtcaccgtctttttaacgggctcattaggcgacatgttcctccatgtcgtctttttatatttttatagtaacatatcttttatttaattgtctatttttattagatgtgtaacaaaattttgaagtattttccttatattgcctgctaaacatgtcagatttgaaaggaaaatcatactatggtagaaatcacttatgattctatggcagtacttatacataagtgatttctattgaatatgtaatgaagttcatatattaataaaactttcattggtatagtagtcgcaataattaatttaagcaataaaaaataaccatcatttcaaaactttgacaacgaatgatggttaaagaaaatctcatttagtcaccgtcttttaacgcgttcaataggcgacatgttcctgcatatcgtctatttatgcactgcacaatttaataataatacaattatactttgatgtctatttaacataaaatactggaaatgtagaaaggtaaattcatcttgaaatattcagaaaattctgtataatttaaataaagagatatagattaaatataaagaggtgtttttaaatgaagaacaaaatttttggcgctatattatatttatctttagcacttggattatcaacagcagcttatgcatctacagaatacgcagaaggaggcacttggagtcacggtgtcggcagtaagtatgtttggtcttattattatcatggtcataaaggacatggtgcaacagctattggaaaatacagatcatttagtggttatacaagagctggtgtaaaagcaaaagcatcagctactaaaaataattggtgggtcaatagagcgtattataacatttattaaatactaaataatcatacaaaataaacaacgcaagaggtacaacatgaaatggttcaaattaatacttgatgttacaatcttcattctgattgctatattgttatttgtttatacatataaagaaaacgaagaaatattgcctgatactaaataccctatagcggtaactgactggaataaaaaatatagtaaaaatgagatttataaacgtataaatcaattcgctaaaaatgagaacgtagcaatctataaatcaacttcaaattatacaaacaaaaatgtagataaagatatatatgtatttaataaatcaaaagcaacaactatcactccttttaatgctaaatataacattcattatttaagtgatgacgaattattaaaaaaagatatcaaagggagttattttgtaaaagacaaaaattttgacgtgtctaaattcataaattttttaaaagaatatggtgttactgctgaatcatacaaaatagatcatatgatgattgccgttggtgtcattaaacaaatgaatatagtagttccgttatccgcacttttaatcgtttattttatttattatattttcgaaaagaacattaatttcaaaacgtatgcgattaagtatttacatggttttacattaagaaaaataatttttgaaaatttttcaaagaaatgcacgtattgggtaacgttaatcataactcaaattcttttaactacaagtgtactttggatattaaattacacgggtaatttagatttattcatattaagattagttctgctttcatgtcttttcattttaacgattagtgttattaatttatggactttcttaatgttactaaatttaaatattgccaatatgattaaaggtaagcagcactttaaaacaattcgttttattaatacagtttgtaaaagtattctcttagtactaatagctagtgtaatgatagaaaatactagtgttattaaagatttgaataaaataaaggaaactgagaaatattggaatgtattagatgattattacacgattgaatttgcaccttatcacgaaacgaaacaaagtttgattgataatatgctgcgatcagaacaattagtaaaggctagtgaagcagaaaataatgcgattttattcaaaccaaagggtgactccgttgacaatgacaacttttcgcctgatgaggggaatgtaatattagtaaataatcagttctggtcgatttatcacaagcagtttcaacctgatattccgataaaaaatcaaaaaaataatgtcgaagtaattattccacaaaagtttcatgcaatgcgtaatgaaatcaatcaagcatatcattcatggtttgaatttgtacaaaataaaaataataaagagaataagttatctatacagtttatcaacaaaaatgattatcgaattttttcatttgatgcacgagatagtcgccatttgtcatttatagaggcaccaatcattgtgaatgttcaggcatcagatttatcgaatgatttttattatgccatgatcagtcaaggcgggtatttattcaaaaattatgacgcgctagtaaaaaatattgaaaagtatcatcttgatggggaaatcagtggaataaccaattataaagatagcgtgatggaaatgtatcatgaaaacaatttgaaattaacagtactcaacttttcacaaatcattatcgcaatcattttaataattattattttatttgatgtgaaatattattttgaacaacatcgaaaattactcgtaatcaaaaagctatatggttattcaacattaagagccaattaccgatacttattaataaataatatagttgttgtttttattggaatatttacgaatgtaattttacattctcactatataatgatgatatttgcaacgatccttgtcgttcaaatattattgcagatttgcagcctatactatcatggccgacgttttaatgaagttatcaaggagttttaactatgaaatttatcattgcaatattattaggattaatcgtatccattactattgcttttacaatcatacatcatcctatactagatcgttttaatcctttcttaaaaacggagtatagttatgccaaagtgccaaaaggtacgcaacaatatgttaatattacggcttatagtgaaagaggggaaaagcttgattataaattaacatttaatggattttctcctagtagaacgtatgtcgaaataaagcataaagggcaatatgttatatcgatcacatatgttgaaaaagaggatacaccaaaagaggtaagacaagaatgatagaattaaaagatttaaccatacaaaaaggtaatacacatattttgaagaaacttaatttgaaatttcaatgtggaaaatcatatgcacttattggtaaaagtggatgcggtaaatctacattattaaatactattgctggacttgaaaaaacagggaaacaatatgtctattttaatggtcaattagaacaatttaaatctaatttttacagagataaattagggtatttatttcaaaattatggattaatcgataatctgacagtaaatgaaaatttagatattggattagcatataaaaaaataagtaagaaagaaaaagaacaattaaagatacgttatatagaacagtttggtctgtcaaacagtttaaaaagaaaagttcatacgctaagtggaggtgaacaacaacgtgtcgctttaattagaatgatgttaaaagatccgattgttatgttagctgatgaaccaacgggtgcgttagatcctaaaacaggacagatgattattcaatcattatttgatttggtcaatgaaaataaagtgctgattttagcaacacatgatatggctattgcaaatcaatgtgatgaaataatagatttagaacagtatagaaaagtagcatctatgtgatatccaaaagataaaattaaaagccaatcaattgggaatgttaatttcaacactccatttgattggcttttataatgcgttgctatgttatgaaagtaataacggcaaactgaaaaaaagcaatataataatatttaatacgattagtaataaatgtaattgatttttcgttttaatatagcaaaaaacaatgactaaagataacaacaatatcatgattgcacctgggaagaaccataatgctgaagctgtgtaccaaatcattggtaacgccataataataaaagatataagacaagaaaggataccaataatattataagttctagtcaaaattacacctccaattttcattttaaaatgacatgcgtaaaacaatcattttaaatacatcatacaataaaattaaattgtatgatagataaatttgaaattaaattgaattggcttgattaaaaggtgattttatagaggataataaaaatggttatttaatagaaaaccataatattaacgacatggctgataaaatacttcagcttgttaataatgatgtattagcagcggagtttggttcgaaagcgagagaaaacattatagaaaaatattcaacggaatcaatattagaaaaatggttaaatcttttcaatagataaatgaaaaaatcctaggtattcatgagtacctaggatttttacgcatgatatatacaaaaaaagagaggatagtcctctcaaataatagttaataaaattgtagccatttcttccagctataactactaatacaagctaagttcattacgatatgtataatttcaaattcataaccacttacatatcctcttgtaagtttaagtgtgaagattgagcctaacataacacaaatataaaaaacattaacataaggcgttaaaaagccgataataagtgctaaacctccaacaacttcaccaattgacatcaatactgcgatggtaggtggtaaacctaaagagcctaagaagtgaattgttccatctaaatcaacaaatttcaaagtaccatgcactaagaatgatgttgctaacatccatctaattaaaagcatacctaatttcatcatgtcacctccaacattcgtattttaaaacatagtccaaattatatttgtaaagatgtggaaagtaaagattatttataaaaataattattaaatatttattaaatgttctattgtattgaacaattgttgtagaaagacgtttaagtcatcagttacattttgtatttataaataaagattagcacagcatagtacaaagtttagaggtaaatgaattaattattgcatcgctatttatgaatcgtaaacactattatgaaattgcaagagtagtatggataattagaatgatggtttgagataaatgagtgttattaaccagtgcgtcatcttcaaaattagaggccatttgctgtttataataagatgatttgataatcaactatgataagaaaaaataataacctcctaaatatatcataaacaaattaaatgataaaataataatatagttttctactaaagttgtttggaggtatatgtgtgtataggaatatcgttaaactagttgtgtttatgctaatcttagttgtagcagtagcgggttgtggtcaaaaagatactgaagagaaaactgaaatgacgacaataaaagatgaattaggaactgaaaaaattaaggaaaatcctaaacgtgttgttgtattagaatatagttttgctgattatttagcagcattagatatgaagcctgttggtattgcagatgatggcagcagtaaaaatataacaaagtcagtaagagataagattggggcatatgaatcagttggatctagaccgcaaccgaatatggaagtgataagtaaattaaaaccggatttgatcattgcagatgttagcagacataagaaaatcaaatcagaattgagcaaaattgcgccgacaatcatgttagttagcggtacgggagattatagtgcaaatattgaagcatttaaaacagtcgctaaagcagtaggcaaagagaaagaaggagagaaacgtctggaaaagcatgataaaatattagcggagattagaaagaaaattgaacagagtacgttaaaatctgcatttgcattcggtatctcaagagcaggtatgtttattaataatgaagatacatttatgggacaattcttaattaaaatgggtattcaacctgaagtcacaaaagacaaaactacgcatgtgggtgaacgcaagggtggtccttatatttatttaaataatgaagaacttgccaatatcaatccaaaagttatgattttagccactgacggaaaaacggacaaaaatagaacgaaattcattgatcctgcagtttggaaatcattaaaagctgtgaaagataacaaagtttatgacgttgaccgaaataagtggttgaaatcaaggggtattatcgcaagtgaaagtatggcagaagatttagaaaaaattgcagaaaaagcaaaataaaaatacagcgccactcgtaaatcatataagagtggcgctgtatttttaattatgtttattatctgtcggatgtgatgatttacctgaaagtttatttcgaataaatttaattacataaccgacaaggattgttttaacaattcttttaatgaattggcgcatcgttacatacctcatttctctatatgttacgaactatatacccattcatatatgctttttaaacgtcattgtcacaatttaatttttagggaatataatataaccatctttatctgcttttttagtaaaaatgacgaaaatggcatgtattattgagatgatggtagggatacctgtccagaaaaataataagtgaaaaagaccttgtccaaatttatcagcataaaatttatgaatacctaaacctccaagaaataatgcaacaataacataaatggctttattgactttcatttgtaaatcctccttaactataattctacttaaattcgttgtgaaaaccaatatttctaactttagaattttcaaactttctaaaattataagtatatctttttaaaataagctagaatttctatataataaatgttaataacgtaaaagggaatgatgacatagtgatacgtcaagcacgtccagaggaccgatttgatattgcgaagttagtttatatggtttgggatgatatggaattagaattggtaaagcatctacctaaagacatggtattagatgcaattgaaaaaagctgtgttgatgcaacatatcgaactttttatcagcatattttagtttatgaagtagaaaataaagtagcaggttgtattattagctatagcggtgaaaatgaattgaaatatgaaaaagcatgggaactacttgacttgccagaagaaataaaacaatatggcacgccattacctgtaaaagaagctaaagacgatgagtattatatagaaacaattgcgacatttgaagcatatagaggtagaggcatcgcgacaaagttattaacgtcattacttgaatcaaatacacatgttaaatggagtttgaattgcgatattaataatgaagcagcattaaagttatatcacaaagtaggctttatatctgatggacagattgaattatacaagcacatgtatcatcatttaattgttaaataaaaaactcgacagttcgatgtaagtcgattgccgagtagaatcatcttatattaaatgcctgcaaataatgcactaatataaatacctaatgcatataataaaccgaaaaatgtatttgttttaccagcagcagccattgctggcatcattgtaggcggtgtatcattcttcttgaaacgtctgataactttaacaggcattgggaatgataacaacgcaagtaagtaaaataatgagccaccaggtttaataatgatcgtaagtacaataaaggcataagcgataaagtacatgattgccataaatgttaaagaagcatttttacctaatagaatgggtaaagttttacgaccacttgctttatctttgacacggtcgcgaatattgttagccatattaattaaaccaatagtgattactataggaacacttaaccaaattacataactttgaatattaccagtttgaataaagaatgcaataacgataataaacatacccataaatacgcctgagaataattcaccgaaaggcgtccatgaaatagggaaagggccacctgtatataggtaaccaacagccatacatactaatccaactggtaataaccaaaatgaagagttagcagctaaaaacaaacctaatattgctgctaagatgtaaaatgcaatggctaatcgtagcacaagctctgggctcataccgttgcgtacaatggcaccaccaatgcctacagattcatgatcatcaaggccttttttataatcatagtattcgttaaacatattagttgctgcttgaataagtaagcatgctagtaacatggcaatgaataggctgattttaatatgatcttcgctaccaagaaaatatattttagatgctgctgtaccaactaaaacgggtactacggaagcagttaatgtatgaggacgcattaaatgccaatatttcttaactgtagaatattgctgatattgattactcattgaatacaaaacctctttaaatcatattttttataacaaagatattttaatagaaagtagcataaaggtcaattgacgtgaaaaattgcaagataagtttaagcaattcttgtaacacaattatccaaaaatgatacaatataataatgagtgaaaaaagacgaagaaagaagtgaaatggatggctacgggcgtattagaggacgatattgtcaaagagatatatgacagctcaaaggaatgggtttcagttgaagtgaaattatcacagtcactagacccgagcacattatttcatctcactgacaatgaggcaggagatcgcttttatatgcgtttgaatgataatcgaacgtcatattttggctacaaagcaattcaattattcaaaaataattctaaaaataaacaatctatttttaaagactgggaaaaattaaaacataacatcacatttatacatccgcaatctgagaaacatcatcttcgagttgttggagggttccaattttcaagtcataaatcagatgatgaatggcgagagtttggactaaatcattttgtattacctgaagttttaatttcaactgataataatgggacatttttaacttatacagttaaaagggaaagttttactgttgaggcattgaacgatttaatggatttgttcaacaatatatcggatatagatgtggacgagcaaattggggaaattactagaaatgaagatatttataaagatgactggcgtcaacttgtagtagaagcaatagaatctattaataatgaagaaaaaattgtactagcacgtagacggttaataaagttcgataaagatatcagtattccatatattctaaagcaagcatattctaaagaaaaaaatagttatatattcttgttagaatcacaagattctatattcttttcacaaacacctgaacaattaataaaggtcaataataaaatactatcgactaaagctgtagcaggtacaattaaacgttcacaagatgaggacgaagatacaaaaaatgttgaagcatttttaaaagataataaaaatttaatcgaacatcgatttgttgttgacagtattttacatgatattaaaccttatatcactgaattacattatgataagacgcctaaaattctaaaaaatgatcatttatatcacttgtacactgaaataaaggcgccactgaaggatgattcgtatattagtttaattgataatttacatccaacacctgctttaggtggctatccaaaagaatttgcgatggattttattgaacagaaagaatttggtacacgaggattatatggtgcgccggttggctatatagatatatatgatgattgtgaatttattgttgcaattcgttcgatgcttattaagaaagcacaagcaactttatttgctgggtgtggcattgttaaagattctgatccagatagtgaattggcagaaacgaatcttaagttcacacctatgatgaatgcattaggagtcgatatgaatgggaaatcataaagcagctttaacgaagcaagtttttacatttgcatctgagttatatgcgtacggcgtaagggaagtagttatcagtccgggatcacgctcaacgccacttgcactggcatttgaagcacatccaaatattaaaacatggatacaccccgatgagcgaagtgctgcgttttttgcagttgggttaattaaaggcagtgaaagacctgtcgctatattatgtacgtcaggtacagcagcagcgaattatacgcctgcaattgctgaaagccaaattagtagaattccattaatcgttttaacaagtgaccgtccgcatgaattaagaagtgtaggcgcaccacaagcgattaatcaagtaaatatgtttaataattatgtaagttatgagttcgatatgcctattgcggatgatagtaaagagaccattgatgcaatttattatcaaatgcaaattgctagtcaatatttatatggaccacataaagggccaattcattttaacttgccatttagagatccgttaacacctgatttgaatgcaacagaattgttaacttctgagatgaagattttaccgcactatcaaaaaagtatagatgcatcggcattaagacacattttaaataagaaaaaaggtttaattattgtaggggatatgcagcaccaagaagttgatcaaatactgacgtattcaacgatatatgatttgcctattttagctgatcctttaagtcatttaagaaaatttgatcatccgaatgttatctgtacatatgatttgttgtttagaagcggcttagacttaaatgtggatttcgtaattcgtgttgggaaaccagtgatttctaaaaagttgaatcaatggttaaagaaaactgatgcatttcaaatattagtgcaaaacaatgataagattgatgtctttccaatagcaccagatatttcatatgaaatatctgcgaatgatttctttaggtcattaatggaagacacgacagttaatcgcgtaagttggttagaaaaatggcaatgcttagagaaaaaagggcgtaaagaaattaaatgttatttggaacaagctacagatgagagtgcattcgttggtgaattgattaagaaaacatctgaaaaagatgcattatttattagtaatagtatgccaatcagagatgtagataacttgttattgaataaaaatatagatgtctatgcgaatcgtggtgcgaatggtattgatggtatcgtttcaactgcactgggtatggctgtgcataaacgaataacattattgatcggtgatttgtcattttatcatgatatgaatggactattaatgtcaaaattaaataatattcagatgaatattgtattattgaacaacgatggtggcggtattttttcatatttaccacaaaaagaaagtgcaaccgactattttgaacggttgtttggcacaccgacgggattggatttcgagtatacagctaagttatatcaattcgattttaaacgttttaacagtgtttcagaatttaaaaatgccacattgttatctgaaacttcgacgatttatgaattgataacgaatcgcgaagataactttaaacagcatcaaattttatatcagaaattgagtgaaatgattcatgacacattataattactatgaagcaaacgttgagaccaatcaagttttagtattactgcatggttttcttagcgacagtcgtacttatcataatcacatcgataaatatactgatatctgtcatgtcatcactatagacttaccaggacatggcgaagatcagtcttcaatggatgaaacgtgggattttgattatattacgacgttgttagaccgaattttagataaatataaagataaatcaataacattgtttggatattcaatgggtgggcgtgttgcattatattatgcaattaatggtcacatccctatatctaacttgatattagaaagtacgtcaccaggtattaaagaagaagcaaatcaattggaacgccgtcttgttgatgatgcacgtgctaaagtattagacatagcaggtattgaattatttgttaatgattgggaaaagttgccattatttcaatcgcaactagaattaccagttgaaatacaacatcaaataagacaacaacgattgtctcaatcgccacagaaaatggccaaagcattaagagattatggtacaggtcaaatgccaaacttatggccgcgcctgaaagaaattaaagtaccaacattaatattagctggagaatatgatgaaaaatttgtacagattgcgaaaaaaatggcaaatttaattcctaatagtaaatgtaaattaatttctgctacaggtcatacaattcatgtggaagatagtgatgaatttgatacaatgatattaggatttttaaaggaggagcaaaatgactaacagacaatgggaaacacttagagaatatgatgaaatcaaatatgaattttacgaagggattgctaaggtaacaataaatcgccctgaagtacgcaatgcgtttacacctaaaacagttgctgaaatgattgacgcattttcacgtgcacgtgatgatcaaaacgtttcagttatcgtattaactggtgaaggtgatttagcattctgttctggtggtgaccagaagaaacgtggacatggtggttatgtaggtgaagaccaaatccctcgcttaaatgtattagatttacagcgtttaattcgtattattccaaaaccggttattgcgatggtaaaaggttatgctgtaggtggcggtaatgtactaaatgttgtttgtgacttaacgattgctgctgataatgctatttttggacaaactggtcctaaagtaggttcatttgatgcaggttatggttcaggatatttagcacgtatcgttggacataagaaagcacgtgaaatctggtacttatgtcgtcaatacaatgcacaagaagctttagatatgggtctagtaaatacagtggtacctttagataaagttgaagatgaaactgtgcaatggtgtaaagagattatgaaacactcaccaactgctttacgattccttaaagcagctatgaatgctgacacagatggtttagctggtttacaacaaatggctggggatgcaacattgctttattacacaactgatgaagcgaaagaaggccgtgatgcgtttaaagaaaaacgtgatcctgacttcgatcaattccctaaattcccataagttattttgaatatgatattaagtcacttgcgtcgtttattagcgacgataagtggcttttttattttataagaatttaaaaggggcttttaattaattatcataaagataagatagtttgagaaaaattaatagagaaagaataaatgttaaagattattattacaatgaaaaaacgagctggtgagaattgaattctcgccaacccgttttatgaagtgaaatcatttaaattagttatactaagcgctcataaacgattgggcgcgaagtgccaataccttgtttggatgacgtttgcatgaggatatgctgtgtatcatcataatcaagaatataaatgatttcttcattatcaatagatgaaaatttaatgcgttgatgtgccgtatctataaaaagaatatgatattgattgtgacttgtatcatcgccatgacgtatacaaattgatttttgtaattgatgattactccaattaccaataaataaattgatatttgtttgttctagatgtgtgagtttggttgtgtcgtaaactaaatttataaattgtagttgatacatagttttacctgcctttaatcaatatctatattactttttaataacctatcattgaaccataccagttataatcacgattgaatgataaatgtaataggcttgaatctgcatcttggattgataattctgtatcccaaggattccagtagataagtttttcttggtcattaattttagcattaccaacaactgctagtgcatgtcctaaatgtgggtcattagggttttgagatacactttgtgcaagaatcataattcctacattatcttttgtaagttgatcaacttgttcatatgatggtacaccttcttgataatgaatatctctgccttgtgatttaccgtattcaatcatttgattagggaatgttgcacaattaggaaggtcttgctcacttacttcagggtatagtgtacgcataatatcatgtgcattataagtgtctgtatttttagttgcatttaataatgctgccatactgaatcctgcacaccatgagttatcgaattgttgttctctaattttgaagttttttaatgtgttttcatattgaacttgatcttcttgtatcgcttcgttttcttcaactttagtaggtgttactgtattttttaactcttgtttcaattttgctgaaactgttttagcactttctttttcttttacattaccaggtagtggcgtagcttttactaatctaactttgccatcttcttcaaaataaaatcctttttcatcagtaagaacagtgatatttgaatttttatctttaatttggtctaaatctttagcgatgaagtttgaaattttaacactgtaattcatgtcttcttttgatttgtttaaatcatctttatttttagggctaagtgttaaagtataaacaattttaccgtcttttataactggataatagtaactattatcttcttcaccattaaatttataaattttaaaagcttcgccaagttcatatttaccagtttttgcattactttgtttatctaatgctttagcataaccagcaaattgttgttgtgctagatcttttactttttgaggtactttgtcactcttaacattaatttctagctgtttagagtgtgaatcagctttggctttattgctattagcaaatgcgcctagtgataaaataagcatcgaaaccattatgatgcttataatattgaatactctagatttacatgaactattcatataataccctccatttaagtcaaaatattttgcgttgctaagtctttgcttctatttactaaatccaaattaagatgaagtttatgcagcgtcagggttgtctgaattattgttatcgccattgtctggattatcagggttatttggttcgtctgggttgttagggttatctggattattagggttgtcagggttatttggttcatctgggttgttagggttgtcaggattgttagggttatctggattattaggttggtcatcgttggcaaaattgatatcttcaatattttgttttaagaagttgcgcacattttcgttaataaatactgcaccattaaattcatttggtacaccgccccaatgaattccaatcacttcatttttctcattaaatacaggtgatccagagttaccaccagttgtacttaaatcatattgcattgcttcaccttttaagtatgttatttttcctttactttcccacattgttgcgacaggtttatcacctggatatcctgttacagtaatattttggttaacttgtgtttcagcattattactcattgttgctggtttaactacttcgccaatatgtttgttttgctcattaggggagaatttaactattgctaaatcaccttcgcctgaatatttagtgatttgttcagcagtgaaaccaccatttggataattgtcttggttaattgcagaagggaatgcttttaaagcatgaggatcaccgtgcgtagcatctacgacgtgtttatttgttaaaagagtatctttacctacaactacaccggaagcaataaatgtaccagtaggtgcttcaacttgaatataagttacgggtgcataatgaccattcgttgtatctgtaatttggtgacgatcgttatttggtaatataacatttgcgtgttcacgttgttctaatggtttaaggttaccgcctttttgaatcttaggtgtttgctgtttatctgtctgcgtttgttgtggatgattgtccatggcttttgaagataacgcatttgctgctggagaactcacaagtgtcgctgttgtcaaagttgcaacgaataaagaactaacttttaaaaatttacctttcatctaaaaacctccaaaaaatttatttacaagttaaatataacactaaaaatttttaagtcaataagaatatataaataaattaaaaagtttttgtaaagattagagtttacaaaaacattaagggaattaaaattgaattgtattatactttattcgattgagttaaattgataaggtcgtcaattgtttgcatttatctaaaagaataaataagaaaggaattgagagcgaagggaaagtatttgtttataataataaatagtaacgtttgaataataattgtttggccaaaggtagattaatatgagtggtgatatattatttgagtgcttaagtttcgaagaacaattataagttagcatattaaaagcttttgatagaatcattttgagtgaggtgtttaaaggagaggaatataactcggtagtatttacagtctctatagagtattatttaaaacttatagaatataaaaaactgaacgtactatgaatttagttcacgacgtccagttcaacatatcatttttatttagtatttaaatatttagcaagtctcttcataccttcttttaaaacatccatttcataagcataggaaatcctcacaaatcctttaccgaattctgtaaaggatgagcctggaacgattgctaaatgtgttgattcaagtaaatcaacacaaaattcgaaatcgtcatcggtgatatgcttaatacttgggaaaatataaaacgcgccttcaggttgagcggtaatctcaaaacctaatttagttaattcggatactaaataatttcttcgttctacataagcttcattcatatatttaggagcttctaatccttcgttaagtgctgttatacatgctatttgagctggaacattggcacaaatacaattataggcgtgcataaatgttaatttatcaatcaaatattgaggtcctaatagaaaaccaattcttattccggttgctgagtgtgatttacttaaaccaccaattaatattaattgatcacgaatgtcttcaaattcagcgaaggatacatgtttaccactaaatgtattttcagcataaatctcatcgctaattataaatatcggatatttttttaatacatttacgatatttaaaacttcatttctttttaaaactacgccagttggattagtcggataatttaacaagacagcttttgtctttggagaaatatgactttctaacgcatcaggtgtaattttgaattgtgttgctgttgtatcaatataaattggtttaccacctagtacttcgatgagtggaatgtagcctgcataaattggtcccggtattataatttcatctccaggctctatgatagaacgtaacgttgtgtctattgcttcacttgctccatttgtcacaataatttcttcaggatcataggaaaaatgataacgatttttgaagtattgactaattgcttcgcgagtttctaataaccctttattgtgagagtatgatgtcttgtcattgttaatagcatcaacatatgcctttttcacaacatcaggcatcgggaagtctggttggccaatagttaaattaacacaatcatccaaattattcatgcggtttgaaaattggcgaatacttggtgctcttaaatatttagaattagaatttaaagaaagtttcatttgtgacacctcaaatataaatcaaatattgtctaaaaatttagaaattaataatatcataacatacttttaaagcaaaaaagggtaaattacttaagctttatttgaaaaacgaaaaatgtctaaatacactgtagtaactacttttcaaaatgaatgaagtggttacagttaatgtacttagacattaaataattatgagtctttaaactgtgatggtctttgtaaattaattattggatttgtccatttacaaacaaagtttgtagataatacatatacgatgattacagatatacttattaaataaagatacgtcattaatgatataggattatcgaatgggtaccattcaaatcctctaacaatgccaataattaaaccatgtaataaatatacgtatagcgtacgactaccaatataagtatataattttttctttgttgacattaaatttagaaacgcagtcattgcgattaatataattccatataatataagtcgtttaaaaggactgaatacactctgtccttcattttcaagtgaagtatatggtgaacttcctaataaccaatctgcattgataggatgaatcacgtaaatgataaaaaacaaaataaaggtaatgatagataatggtattagttttttatttttaaaaatagccgtatgttttttggtgaaaatgtaacctaggtaaaatattgggaaaaatacgattgtccttgaaatgcttaagtagctatcgatgttatctgaaaaacctgctccaatagatataataattgaaaccgatagcactttatatggattaaatcttctaactattactaaaatgacatgaaagaaaaatagcgtgatcaaaaaccataacgcaaatactggattaaaaggatcaagttgtaattcgtcacttttacctgttaagaaataatatattgaaaagaatgcaaaaaatatcatataaggtactatcaaacgttttgaaattttttctaaatagtatggtttatcaatatttttcgcgaaataaccagatataaacaaaaatgttggcatatggaaactataaataactaggtataatgctgataaatatttatcgccactagtgtagggttgtaacatatgtccaaatacgactaataatattaaaattgctcttgcgttgtcaaaaaaataatctctctcttttaatgaagtcatattttatctcctttatgtccataagactcttactaatttattatattttgtattagttatgcaacaaatttgtctattgtgtcgaatagtattgtaaaaattataaaaaaagcatataatattataaataatatgtagtggagtagaacaacatgtataaacaacttgaaaaacttattacactgactaacaatgacttaaacttagtgaatagaagatttggacaacgcacggatatcacatctgaacagctagaacttctccgtattttatttaattacgatcgcttatcacagtatgatttgacgatgaagattagcagggaacaatctatagtttcaaggtggattaagaaattagttttgaaagggtacatcacaagtcaacaatctagcgaagatttaagatgtaaagaattaattttgactgatcaagcacgtacattaatttcacaaataaataatgcacgttgcgaattgattgaagcaagatgtcaatgtttatcggaagtcgaattagataatttaaatcaattacttgataagttaaatcaacgacgcatatcgttgtaacacggcaatagcaaacacataatttagtgtcattgtgcacacaacaaaaattgaatcatgaattacaagcaaaagtagcggtgattgttaaaattgatggtaaacaatcaccgctatttttgcttgtgtatgtataaaaaagggatcaaaggtcatcccccatgattgatagtggggaggatgacttttgatcctatgttcatgttgcttatttatattgtgggatgtcgaagtatttgccgacttcgccaattttatcatagtagcctttgatgattttagcattgatgttagcccaatctacatctgtagcatattggtgtgttcctggatgtgcaggattccatctcattttgtaaagcgtattttgaccagcttttacatatgagttgccgatgaatttagcaccaccaacgattgcttttgatactgtgtcccaaccagcttgtttagcatatttaataccttcacgtaaaggatcattatcatatgcagcaataccaaatacgttatggtatttcgtgtttgagttagttacaactttgttgttcactacatctgcaccttttgctaattgagaagtaccgttacctgtttctaatagggcatgtgagataagataaacttcattaatgccatacatttgagcagctttgttaaatgcagcaccttggttttctaatacacctttaccttttaagaattgattaattttatcaatagaaatattttgtggttggtctaagcgtaagaattgatattttaatgctggatcttgagctaaacgcttcgtatccattgcatgcttaacatcattaaagttagcatctgtccacttacctggtacacgttgtacttgtggtttatattgtaaaccagcttgtatttgagcaacttggtttaatgtcatacctgtttgattatacttaattaattctttagctaaatcagttgatttaatccatgctaatttaccgttagataatttaccatagtaccaagtttgtccattaatgacttgttctttaacaactgcgaatggttgttcattaaatgcttttaatgagtatttagctgtatcagaatttggtgttacatagtaataaccattaccatttttaattacataagtgtagttataatctttggcagctgatgtagttggtttaacagcagttggtgcagttaaatcttttgcatttacccaaccagtgcggttattaatagtaccgtataaataaacatctttgcctacagatacttgtttcgttgcattaaatgtaccttgagcaatgttattgcctgttaaaatgacttggtttttagtaccccaaggaaccattgataagccgttatttgatttattaacagtatatttttgagttgttttaacttctttgcctaagttttgaacatttaagtctttaacattgaaccaacctaatggaatattatgacttgtattgtttaataatacatatgtttcattaccatgtgcacgttcttttgttacatagaatgtacgatccgcatattttgcgccgtttttcgctgttttttcataaacagaagcacgaataccagtgttgtttggtttaacttgagcaattttgctaactgtttgagtcgtttgaggtttagtaacagcataagcttttacagctgtttttggttgtgctactgctttttttggtgcagcaggtacagctaaatatgctttacttacccaaccggatttaccatttacagttccatataaatagatagatttatcaatttgttgttgcttagtcgctttaaaagtttggttacctgtaccagataccgcaccagcttcttgtttataagtaccccaaggtactgaatataatttagtgcctggttttactgtatatgtttgcattacatttacaggtgattttgcattgttataaataacgtcaccttgtttaacccaaccaattaaagttggactattgtaatctttaactaagtagaatttgtttccacctagacttgcttcttttgttacagcaaatgttttttgaacttctttcgttggcttaccagttttgtcataaactgtagtgaataagccattgtttttagcattaatttgagcaacaccgtttaatgatgaaactgttaatttattgtttgttgtaggtgttgatggcttaggtgttggtgtaggcgtaggtttagcagtatcaactaaatatgctttacttacccaaccagatttaccattcacagagccatataaataaattgatttatcaatttgttgttgctttgaagccttaaatgtttggtttccagagccagacacgctaccagcaacttgcttagatgtaccccaaggtactgtataaagtttcgtaccaggtttgattgaatatgattgatttacatttacaggtgatttagctgtgttgtaaaccacatcgccttctttaacccaaccaaatttattaccagaattgtaatcttgaacaagatagaatttttgattacctaatgtagctgttttagatacagcaaatgttttttgaacttcattagttgctttaccagttttgtcgtaaacagtagtatataagccactatttgtcggtttaatttgagcgacaccattattagcagcaactgttaatttaccagttgatggtgttgatggtttcgacggtgttgttggtttcgatggtgtagtaggggtagttgtagattgcgtaccccatggcgccactttacccatttttattaaatatttttcattaattaagtcatataattgatcataactataattatgacttcttaaatatccatgtggatcggcatggtccgtaccacctaaatatttacttacagcgtagtgagtccatactgtaccatttccatcatattcagcactatcaggtttcaaaccataatattgcaattgtgtagctgcatagtcagcatagttattcattgaacgtgcaaatgaagcataatcgtgtgtatgaacgatttcaacattgatgaatctagggttaccgactgcaccgacaccccaagataagtaatccgttggtgctgtttcgattatacgatccccatcaacaaatgcatgtacgaatgcgttttgatagttgtttttcatataactaatttcaccatttatcgtcgaacgatcattagctgtatcatgaactacgataccttcaggacgcccaacaccgttacggtatgcgtatttagggaagtaagatgtataatcttcttcaatcttaggtgcttttaagttatttttacgaatgtaatcgttaattgaagagtttacttgtggtttatattttggcaaactcgtttttggtgttgcagcaactgatcttggttgtgctgaagcgctaaaagtagttactttaggtgtcgcttcagttttagctttaggtgctgttgtagttgcagctttaggtgctgcggctttatattgcgtttcaagagctgcaggtttggcagctgatttaattaattctggattaatttgattttctgaattatcatcttcatcatcaactaaactataaccagcatttgtaacattagtgttagttttaggtgctgtagtgcttgttgactttgcaacaggctgcgtattatttgtagtcgctgattgattagcacgagtgtcaccatttacttgtgcagtatcaactttttgacttacttgagcattgcctgttttgttatttgctgtttttggttggacaatagcagggtcttgatatacttgagtgccagaaatgttttgcgttggattttttacctcagcctttgcttgttcagtagttgctttaactttattactatctaaaacgtttttattagtagtttgatcttgtgtcgtctcagctgcttgaacttgatgtgcagtgactgctgaacctacaagcgttaatgcaaccattgatggtagtttgtaattgaattttttcgccattctatttattactcctaacatttattaattattactaacattatagtacctgttttatatacctgtgcgtatttaaccaatttgtaatatactcttaatttacattttcactgtaaaaaaatgaaaaaaattttgaatctcaatggtgacgtgacaaatcaaatagaattgatgtcaatttaagaattggtttattacaaatgtttctaaaatagatacaactttttttaattaagcgaggttaacttttttgtcatttcaatatgctcgatgccttcctcaagaaatatattacctctcattttaaagtttaaactttcataaaatgggatagcatgacattgggcattcataatagctacgtaaaaaccttcatctttagctaatgattctacagcttgcataagcattctacccattccttgtccacgatgtgattttgtcacagccactcgttctattttgacagttgtttcattaatagggcgtatacgagctgtggcaactggctgtccattatcatatccaatgaggtgaatagattcagattcatattcatcaatttcactttcctctgggacgccttgttcttctacaaacactttctttcttatatagaagcaatcttctaacatcttttgattgtttacttttgaaaacataaaattcctccatatcctaacaaaatcatttacatttaatttactaataataacatagaataacgattgttattttccacaaaaataattagacataaaaaagctataaagatgattcatatgaatcatctttatagctaattaattattaatgttatagtgcttcttttctaataattgctgtatattgccaaaagattcgcatttgagcaatattccaattattcattcccattgtaaacccagaaggtttaaatatattcacatctgtcacttctaaagctgctgcgactaaatattgtaatggaatactaagtgatttcattgtttcggtaatgccattttcatcatatacccatgaaaatggtaactctgattcgaaaacatctacactattgaaaatttcaggtagggctaaaatataacatgcaccatctacaataggattctcgatactatttttgtaataaattaggagtgcttcatagttttctcgatgctcatgattgacgtaaaaaaattcacttctaaaatgagccatatcttggctatgaataatttgttgttctaacatattaaacatcccatttatatttgcaatcttttcgtatgtttttctactcatgtatgatgctcctttcataaatagtaaatgttaatcgtcatataatattagtttacaacaccattttggttatttgaagcttgtggcgtttgttgaatattaccttgatcttggttagtgttttgacccgtagtaggttgttgctgattattgacaccattgttgttattactattattactgtcgtcagtattattcgaagatttatctttatctgtcgtatcattttgttcttttctcaataaactactatctaaaggcgttaatggtattaatgaaccataatggttgataacacgttgatctaagaaatcatttttatcattgataggtgataattctaaatcattacgaagtaagttagcatatttttgaatgctttcaacgcttggatgataatagtaaataccatttaacatatcatctttaccttttagttgtgcagttttaatttcaacatcatttgttaagtacattttagctaaagctttaatttcagagttagttaaattatgcttagcatttttgcctacaatttgaatcacattatcaagtttatcaatagaatcaacttcctgtgctttttggaataaaatcttaattaattccatttgacgttgtccacgtttcaaatctgaatcatgatgtctagttctagcaactgctaaagcctcatcaccatttaatttttggtacccttttttaattttaatcttaccagtatcatctgtgttaggttcatttaagtcgtatggcacatcatagtatatgccaccaagctcatttacagcctcgacaaatgctttcatattgactctcacataataatcaacaggtacattcatggtagcttctaccgaatccattgcggcaattggaccaccatatgcatgtgcatgggtaatcttatcgtaatagccaactttaggaatgtagctgatagtatcacgtggaatactaagcattctaatttgatgttttgattgattaaaagtagttaaaatcatagcgtctgatctagagtgttcagcatcctgtcctttttttcttcttccatcgttatcatcgatacctaagaaaagaatagagataggttgttcttcgggattgactttattatctcttaaattggattgacgattagcatttttgctgtcttgagaagattcgaatgcatcttgggacgttttaaaaagtaacgtagcgaagactattggaacaacaatgagaaccaatgctagaaggatcaaaaagtattttacaaatttattcatgattgatgctcctatattaaatttttgttaaatcataatcataattttaaaatataattagttgaacgatatttatacaacttcattactaatacattatagccttaaattgtagtactttatagtaaaaaatacaaatgttatgtcaaagttccttgtaatttgaatgttttgttaaaatcaaaaagcatttttaaaaatataatgcgactttagtatgatgtcttaaaaaatttaaaggcgtaatataaattcgagtgatttatacaaagtgataaggtataattaattttgttgtatagataacatattagaaaaacttattactatgtagcgtaaagcataaatgaatgataaattaatttttgtaagttgtattattaggaacctaggttcaaagttttaactatttaaatatataatgaatacattgtgaggctattatcaaatgaaatttaataaagtgaaattggttatacatgcatgcgtgcttttatttatcattatttctatagcgttaatttttcatcgattacagacgaagacacattctatagaaccaatacataaggaaacaaaattatcagacaatgaaaaatatttagtagatcgtaataaggaaaaggttgcgccatcgaaattaaaggaagtatacaatagtaaagatcctaaatataagaaaattgacaagtatttacaaagttcattatttaacggttcagtagctatatatgaaaatggcaaattgaaaatgagtaaaggttatggatatcaagattttgaaaaaggtattaaaaacacaccgaatacgatgtttttaataggttcagctcaaaaattttcaacagggttactgttaaaacagttagaagaagaacataaaataaatatcaatgatccagtaagcaaatatattccatggtttaaaacatctaagcccattcctttaaaagacttgatgctgcatcaaagtggattatataaatataaatcttcaaaagactataagaacttagatcaagcagtgagagcaattcaaaaacgtggcattgatcctaagaaatacaaaaagcatatgtataatgatgggaattatttagtgctagctaaagttatcgaagaagttaccggcaaatcatatgccgagaattactatacaaaaataggggatccattaaaacttcagcacacagcattttatgatgaacaaccttttaaaaaatatctagctaaaggttatgcttataatagtacaggactttcattcttaagacctaatattttggaccaatactatggtgcaggtaatttatatatgacaccaacagatatgggtaaattaattactcaaatacaacaatataaattattcagtcctaaaataaccaatccattattacatgagtttggtacgaaacagtatccagatgaatatcgatatggattctatgctaagccaacattgaatagacttaacgggggattctttggacaagtctttactgtttactataatgataagtatgtagttgtacttgcattaaatgtaaaaggaaacaatgaagttcgaatcaaacatatttataatgatattttaaaacaaaataaaccttacaatacgaagggtgttattgttcaataattaatatagaagatataacatgtatatggcattaaggcatcgaccttatctgaccagtatacgagttatatcttcttttttatagtggtaaaaagtttaaagtataaggttgaagaaggatgagtttaaaaatatgtgttaactgataaaaggggaaaacatttgatgagttggcatcagactaaaatgaatgaaggcgaatacgttggtccatgcgtggtctgaaagttttctaaatctaactggaaatgataatttaataatgtacacttttgattgtttaaacatgtacaatttttaaaaacctagggataattttattgaggtgaacaacattgaaattatctttagacataaatatggattttgaagttactatatttattagttgtggttgttaatgtattaattgaattgattataatgattgtcttataagatatagaaggggacttaaccatttaaaaattgaaggataataaaaaccagctaacaaaagtgttagctggttaaactttacattattaaaatgttgtttataagtgtgaagagtgaccgccttgcataacccaatatgttccgacaacgaaacaaagtgtaattacaagagcaaagataactttgaatgtttgtaaacgtccatctttaccttcagttaaatgcatgaacattaataattgaagtcctgcttggacgaatgcaaagccaaagataattgtcaacttcgcgtggaatgttaatgacgtgtatagtgttacgtaaactgctaaaagcgttaatacgatagatgcgataaatcctacagtatgtttcattattgtactcatccgctatacaccatccctatcatatatacggcagtaaagatgaaaacccaaacaacatctaagaagtgccagtataaacttactataaataattttggcgcattatatttgtctaatccgcgtcgttggatttggattaataaacaaatggcccaaacgatacctagcgatacgtgacaaccatgcgttcctaataggataaagaaactagaccagtaagaaccaattgttgggttaacgccttctgatgcatagtgtgcgaattcataaatttcgaatccaacaaagactaaacctaaaagtaacgtaatgatcatccaaaacatcattaacttttgtttttcttggcgcatgtagtaaatagcaataccacatgtgtaagaactgaataataatgcaaacgtcattattaaaacaagaggcaattcaaataactcagtagtcattttacctgcataatcgccaccatgttgcaaagttaatagtgtcgcaaatagggtaccgaataacgcaaattcggctgtaatgaaaatccaaaagccaagcttatttaattcgccttcatgtgtgcgtgaatcaatagtgtttgtatcatgactcatgacttacagcctccctttctttaatacgcgcttctcttaatctagcttcagtttcagcaacttcagcagcagggatatgatatccgtgatcgatttggaaactgcgataaatcatagtaccaaaaataccgaataaacaaattaatgctggaattacagtttcgaaaattaagaagaaaccgccgatagtcataaagataccaatccagaatccaacaggagtattgtttggcatatgaatgtctttgtaattatggttgtctaagtaatgacgaccatgttctttcatatcaacaaatgtgtcgtagtcattccaatctggtgtaatggcaaagttgtatttaggtggaattgctgatgcagtagtccactctagagtacgaccaaggccatcccagttatctccagttgcttcacgtggagatttgaagtgactgtatacgatactaacaacaaggaataagaatccgattgccattaataatgcaccgatagttgaaattaagtttaataagaaccaaccatctgatggcatataagtgtataaacgacgtggcataccatctaatccaagaatgaattgtggtaagaaacaaacgttaaatccgatcatgaagaaccagaagcaccatttgtttaatgtttcgtttaatttgtaacccatcatctttggataccagaagattaaaccagctaagcaggcaaatacaacaccagtaaccaatgtatagtggaagtgagctactaagaagtacgtattgtgatattgatagtcagcagatgccattgctaacattacacccgtaacaccacctaaaaggaagttagggataaatgctaatgagaataacattggtgactcaaatgtaatacgtcctttatataatgttaataaccagttaaacaatttcacaccagttggaataccaatcagcattgttgaaattgagaagaatgagttgattaatgcaccattacccattgtgaagaaatggtgaacccaaactaagaaactaaggaacgcgataccggcagttgcccataccatactttgatgtccgaataaacgcttacgagcgaatgtcgggataatttctgagtaaataccaaatgctggaaggataacgatataaacttcagggtgcccccatacccagaagaagttagcccaaagcattggcataccgccatgtgcaactgtgaagaatgctgtgtcaaatattctatcagttgtcattaatgctaacgctactgttaaaggagggaaagcaagaataacaattaatgtagtaataaatgttgttactgtaaacattggcatttgcataaacttcatagttggtgttttacatcttaaaattgttacaaagaagttgatacctgtagctaaggtaccaagccctgaaatttgtatagctattaagtaatagttaacacccggaccaggactgaattcacctgctagtggcgcatagtttgtccaaccagctgctggtgaaccaccaataataaatgacaggttgaataaaatcatacctgcaaagaatagccagaaacttacgttgtttaatactgggaatgcaacatcacgtgctccaatttgtaatggaacaacgatattccataaaccaaagataaatggcattgccatgaagataatcatgattacaccatgtgtactaaaaatttcgttatagtggttagattctaaaaatttgttatcaggtactgttaattgcgcacgaataagtaacgcatcaataccaccacggacgaacattaatacggcacagattaaatacataataccgattttcttatggtctacagatgtgaaccattctttgtaaagatatttccataatttaaagtaagtaattactgcgattaaaccaataactaagaatggggcaccaatttgtgccattgtaatcatccagttacctttaactagtaattgatcccatggaaaattcattaatgtccacctccatgatcatcattgtcttgatcttgcgcatcttttgaaattttcttcatttctttcgcatttttcgattcatctttcttgaactcattgttatatggttcgtcatttccaagaatcatcaatttcataccatgtcgtttatagttcgcatttgtaatttgagctttacgagcaggtattaatggtttgtctgatacatctttaaacatattttcttcactagtgaagtttggatctttcaattcgaaattgaaacgtttatatgcatagaagatgtattctggatcggctgctggatcaacaaacgccatatgtgtaccattaaattctaaagctttattaggtgtgcttggtaataattgtttatcaaatgtatcttgatctaacgttttcttacctttaacttctttcacccatttgtcgtagtctttttgactaacggcatttactttaaatgtttgacgtgagaatccttcaccattgaagttagagttacgacctctgaacgtaccagtttgagatgcttctaacgtccaattcattgtcatgccagtcatggcatatttttgaccacctaattgtggaatccagaaacttgtcattgtatccatagcttgaagcttaaatacaacaggacgatctttagggattgttaatgtattaacagtctctatatgttcatctggataagcaaagaaccatttgtatcctgcacttactgcatatacaaccattggatctttctcactcttcggtggtttttcgtaatcgtacaaagttttaactgtaggaatagctaaagcagcaacgattatgataggtattacaaaccatattgtttcaatgatggcattatggtgcatcttaccagattcggcattcttattataactatacttgtaaataaaaatggcgaacatgccaagtacaacgaaacaaataacaagcatgaagacgattgaataaagaatcaagaacttctgactacttgctactggcccttttgcgttgaaaatttctatatttgaacaaccactaagtaaaattagtgtgccaaataatagaagcaaagacttaaattttgacacttttttgacctcctaatactacaaatgtagggcttaacattaattttaagttattacacaatatttacaagggcttataggaaaaaaattaataaaattgtatcaaaaatgttgataaatcaaggtgtgacgtgggttcacacatttgttaaaattatgtgtacattttgtgactaatagcgtttttgaaaaaattgcttcatatttaaaagggaagttgagaatagctttcaattaaaggttaattgaatgaaaataaaaaaagtttgaaattgtctaataaattgaaaatgatggctatttcattgaaaggaagcgcaaacattttaataaggaatttgccaaaagtaatttaacgttaaacaatgaaaagtggaaatttgtttgttcaaaatcaaaacattctttttaaaaagagcagttaagttttaataatttgataggtagtcctttggtatacagaaaaaatacaatatttgggttaaagttgcatatgaagttggaataacaaataaaatggtagcaaaacatgttcgtttgctaccattttatttgcagtatagtgatgagggctatttaacctcaatatacctagtggaaattttaattgcaccatctgaatcagtgacatgatatttaatttgatatttaccagatttagatgtatcaatttggccatcgactttaattttatcggttaaatctccatcttctttatcaaatgcacttatgccgtttagaaggttataatcttgacctttcttaataacgatatcattagcgcctttaatttgtggtgtagtattcgtcgttgcatctgcatttaaatttggtgttactagtgtagcagaaacaccgagggctgataatgactgtaatagtttattcataatgtaacctccgaatgataagtcatttctgagttagctttactataccttaatttatattatttacacatcatactatagtcctaatcttaccctataaagaatgaaatttaaatataaatttataaataatgaggaaataattattattttgaaaatctgccacaattgtaaaattaataattccgggataatttgaaatcaaatataactttattcgacagtttgaacttaaattattgtgtatcaaaacaataagaaaagggaggcgaaaatgatgaagaactactaatgattaattatgtagtagtactttatcatagtcacagcttctgtgttggggcctcgccgacttgcattgtctgtaaaaattgggaatccaatttctctttgttggggccaccaccccaactcgcattgcctgtagaatttcttttcgaaattctctgtgttggggcccctgactagaattgaaaaaagcttgttacaagcggattttcgttcaattaactactgtctatataaaattgtagagcctagaacaatgtgaaatgaaatgctcccttcaaagccttcattttttcaatgtctactttgaagggagcatttgattgattaatgtcccagattcttcttattcattgcaattgcgagataatatttaatgtggattaaaagagttcattaaaactcagatattaattctcagtacataactaatgtgaatttacgaatcaacacctcgacgcattttttctgcaagcaaggtattatttaataccattgtaattgttaatggaccaacgccaccaggaacaggtgtaatagctccagcaatttctttaaccgcatcataatcaacgtcaccttttaatttgccattttcatctggcgtattgccaacatcgataattactgctccttctttgacaacatcttttgttactaaaccaggcttaccaactgcactgactatgacatcagcatcttttaaatatgatgccatatcctttgaacgagaatgtaagattgttactgatgcatttttttgaagtagtaacttagaaactggttgaccgacaatatgacttcgtccaattactactgcatttttaccttctaaatcaatatcagcatgttttaatatttccatgatgccgagcggtgtgcaaggtacaaaagtttgttcatcgatatataatttccctatatttattggatgaaaaccgtccacatctttatcaggattgattgcttctaatattttctgttcgctaacttgttttggtaatggtacttgtaccaaaataccacttacagaatcatcattatttagtctatttagttcgtttaatacttcttcttcagtagctgtttcttccaaatgtacgatttctgaaatcataccaattttttcagctgctttcttttttgatctaacataactttgactagcgccatcattaccaactaatataacggataatttaggtgtaaaacccttttcttttagcgcttcaacttgactttgtaacccctgtctgtagtctttggcaatttgtttaccatctaaaattttagcaaccataaaaacttctcctcctattgtcaatatcctaactttgttagttcataaaactaatttacatagcaaaagacgtaaattcaaacaaaaaatcaaaataaagttcgatttttgattgaaaaagcagaaattgcttgttatgctatatctataatatacaactaaagtaattcacaattcaaacttttgaaagggtgtacaaagtgaaagtagcagtcattatgggcagttcttccgattggaaaattatgcaagagagttgtaacatgttggattattttgaaattccgtacgaaaaacaagtagtatccgcacatcgtacgccaaaaatgatggttcaatttgcttctgaagcgagaaaaagaggtatagacattatcattgcaggcgctggcggtgcggcacatttaccaggtatggttgcatcattaacgacgctaccagttattggagtgccgattgaaacaaaaagtttaaagggtatagattctttattatcaattgttcaaatgccaggaggtattccggttgcaacgactgcaattggtgcagcaggtgctaaaaacgcaggtatacttgcagcaagaatgttaagtattcaaaattcttctttagttgaaaaactaaatcagtatgaatcttcgttaattcaaaaagtggaggacatgcaaaatgaacttcaataaattaaagtttggtgcgactattggcattattggtggtggtcagcttggaaagatgatggcacaatcagctcaaaaaatgggttataaagtggctgtattggatcctgctgaagattgtccatgtagatacgttgcacacgaatttatacaagccaagtatgacgatgaaaaggcactcaatcaattaggacaaaaatgtgatgtgattacttatgaatttgaaaacatttcagcccaacaattaaaactattatgtgaaaagtacaatattccgcaaggttaccaagctatacagttattacaagaccgcttaactgaaaaagaaacattaaaaaatgctggtaccaaggttgtcccattcatttcagtaaaagaatctacagatattgacaaagcaattgaaacattaggatatccttttattgtaaaaactagatttggtggttacgatggcaaaggtcaagttttaattaacaacgaaaaagacttacaagaaggttttaaattaattgaaactagtgaatgcgtagctgaaaaatatttgaatatcaagaaagaagtatcacttactgttacaagaggaaataacaatcaaatcacttatttcccattacaagaaaatgagcatagaaatcaaatacttttcaaaacaattgttccagcgagaatagataaaacagctgaggcgaaagagcaagttaataaaattatccaatcgattcatttcattggaacatttacagttgaattttttatagatactaacaaccaattgtatgtgaacgagattgcaccaaggcctcacaattccggacattattcaattgaagcatgtgattattcacaatttgatactcatattttagcagttaccggacaatcattaccaaattcaattgaattattaaagcctgcagtcatgatgaacttactaggtaaagacttagatttattggaaaatgaatttaatgaacatccagagtggcacttacatatttatggtaagtctgagcgtaaagatagcagaaaaatggggcatatgactgtactaacgaatgatgtaaaccaaactgaacaagatatgtacgctaaatttgaggggagtaattacagcatgacattattatatgaaggaaaagcgaagcgcattttctcaacaaatcaagaaaatgaattaagagttgaatataaagatgaagttactgctggaaacggggctaagaaagacacgatggcaggtaaggggcgattaaataatcaaattacttctattatatttaaatatttacaagaaaatggaatagaaagtcactttattaagcaattatctgaaacagaacaattagttaagcctgtgaaaataattccattagaagtagttgttcgtaatattgctagtggatctattacaaagcgtttaggtattgaaaatggtgaagtttttagagaaccacttgtggaatttttctataaaaatgatgcattaaatgatccgttgattacagatgatcacatcaaattactgaatattgcgacagataaagatattgaaacattaaaaacgaaagcgctagaaattaatcaagtattaaaaaaattaatggatgctatgaatttaaaattagtagattttaaaatcgaatttggaaagactgagactggtcaaattttgttagcggatgaaatatctccagatacatgtcgaatttgggataaagctaccaatgcaaactttgataaagatgtatatagaaataacactggatcactgattgaaacatatcaaatatttttaaacaaattggaggatttaaaataatgaaaacaattgaactacatatcacattacaaccacaagtattagatacgcaaggacaaacgcttactcgagctgtacatgacttaggttatgcacaagtgaatgatattcgtgtaggaaaagtattatatatgacagtggatgaggttagtgatgaaaaggtacacaacattattacaactctaagtgaaaaattgtttgcaaatacagtgattgaagaatatagctataaagtgttagatgatgaaaaggagaatgcataaaatgaaatttgcggttcttgtttttccaggttcaaattgtgatagagacatgtttaatgctgctattaaaagtggtgttgaagcggaatatgtagattatagagaaacatcactaagtggatttgatggcgtacttattcctggtggattttcattcggggattacttaagatctggggcaatggctagtgtagcgccgattatttctgaagttaaacgtcttgcagctgaaggtaagccagtattaggtgtttgtaatggatttcaaattttaactgaaataggtttattacctggtgcattattgcataacgattcacatttatttattagtagaaatgaagagttaaaaatagtgaataatcaaacggcatttacaaatctttatgaacaaggtgaaaaagttatatatcctgtagctcacggtgaaggtcattattattgtactgatgaaatatatcaacaattaaaagctaacaatcaaattattctgaaatatgtgaataatccgaacggttcatatgatgatattgcaggaattgttaacgaaaaaggcaatgtatgtggcatgatgccacatcctgaaagagctttagaaacgttgttaggtactgatagtggtgtgaaattatttgaagcgatggtaaaaagttggagggaacaacatgtctaaatttatcgaaccaagcgttgaagaaattaaacttgaaaaagtatatcaagatatgggattaagtgatcaagaatatgaaaaagtttgcgatattttaggcagacaacctaactttacagaaacaggtatcttttctgttatgtggagtgaacattgctcttataaacattctaaaccgtttttaaagcaatttcctacgtcaggtgagcatgtgcttatggggccaggtgaaggtgcaggggtagtcgatataggtgataatcaagccgtagtatttaaagtagagtctcacaatcatccatcagcaattgaaccatatcaaggggctgctacaggcgttggcggaatcattcgtgacattgtctctattggggctagacctattaatttgttaaacagtcttagatttggagaattagataataaacaaaaccaaagattacttaaaggggttgtaaagggtatcggaggttatggtaactgcattggtattccaacaactgccggtgaaatcgaatttgatgaacgttatgatggcaatccacttgttaatgcaatgtgtgttggtgttatcaatcacgacatgattcaaaaaggcacagcaaaaggtgtaggtaattcggtcatttatgttggtttgaaaactggtcgagatggtattcatggtgctacttttgcatctgaagaattgacggaagaaagcgaaagtaaacgaccttctgtacaaatcggtgatccatttgtaggtaaaaaattaatggaagcaacacttgaagcaattacatttgatgaattagttggtattcaagatatgggtgctgctggtttaacatcttcatcatctgaaatggcggcaaaaggtggtagtggtttacatttgagattagaacaagtgccaacacgtgagccaggtatttctccttatgaaatgatgctttcagaaactcaagaacgtatgttactagttgttgaaaaaggtactgaacaaaaattcttagatttatttgataagcacgaattagatagtgctgttataggtgaagttacagatacaaatcgttttgttttaacatatgatgacgaagtttatgctgacattccagttgaaccactagctgatgaagcacctgtatatattttagaaggagaagaaaaaaattataatacttctaaaaatgattatacacacatcgatgttaaagatactttctttaaattacttaagcatccgactatagcatctaaacactatttatatgatcaatacgaccaacaagttggtgccaatacgataattaagccaggacttcaagcatcggtagtacgtgtggaaggcacaaataaggcaattgcttcaacaattgatggtgaagcgcgttatgtatataacaatccatatgaaggtggaaaggtggtagtagctgaagcttatcgaaatttaattgccgtgggtgcaacaccattagcaatgacagattgtttaaattatggttctcctgaaaagaaagaaatctatcaacagttgatagattcaacgaaaggtatggcagaagcatgcgacattcttaagacaccagtagtttctggtaatgtatctttatataacgaaacgaaaggtacttctattttcccaacaccagttgttggaatggtaggtttgattgaaaatgtaaattatttaaatgattttgaacctcaagttggagataaattatatttaatcggtgatactaaggacgactttggtggtagtcaacttgaaaagttaatttatggcaaagttaatcatgaatttgagtcattagatttgagttcagaagttgaaaaaggtgaatcaatcaagacagctattcgtgaaggggtattatcacatgttcaaacggttggtaaaggtggcttactgattaccttagctaaactaagtgcgcattacggtttaggattaaagtcttcaatagatataacaaacgcacaattgtttagtgagacgcaaggccgatatgttgtttctgttaaatcaggtaaaactttaaatattgataatgcaatagaaattggacttttaacagatagtgataatttcaaagtaacaacaccatatacagagattagtgaaaatgtttcagatattaaacaaatatgggaaggggcaattgctcaatgtttaactactcaggattaaacgaagaatgtggcgtgtttggtatttggaatcatcctgaagcagcgcaactaacatatatgggacttcatagtttgcaacatcgtggtcaagaaggtgcaggtatagttgtttctgatcaaaatgaattaaaaggcgagcgaggattaggcttacttactgaagcgattaaagatgaccaaatggaacgattaaaaggatatcaacatgcaattggtcacgtccgttatgctacttcaggtaataaaggtattgaaaatattcaaccgtttctgtatcacttttatgatatgagtgtaggtatttgtcataatggtaacctcattaatgctaaatcattgcgtcagaatttagaaaaacaaggtgctatcttccattcgtcttctgatactgaagtcattatgcatttgatacgtcgaagtaaagctcctacttttgaggaagcgttgaaagaaagtttgcgaaaagttaaaggcggttttacatttgcgattttaactaaagatgcgttgtatggcgcagtagatccaaatgctatcagacctcttgttgtaggtaaaatgaaagatggtacatacattcttgcaagtgaaacatgtgcaatagatgtgttaggtgcagagtttgttcaagatattcatgcgggtgaatatgtcgtgattaacgataaaggtattacagttaaatcttatacacatcatacgacaactgcaatttctgcgatggaatatatttattttgcgagaccagattcaacgattgctggcaaaaatgttcatgcagtgcgtaaagcttctggtaaaaaattagcccaagaaagccctgtaaatgctgatatggtcatcggtgtacccaattcatcgctatcagctgcgagtggttatgctgaagaaataggtttgccatatgaaatgggactagttaaaaatcaatatgttgcaagaacatttattcaaccaactcaggaattacgtgagcaaggtgtgagagtgaagttatctgcggtaaaagatatagtagatgggaaaaatatcattcttgttgatgattccattgttcgcggtacgacaattcgacgcattgtgaaaatgttaaaagattctggtgcaaataaagtgcatgtgcgtatagcatcaccggaatttatgttcccaagtttttatggaatcgatgtttcaactacggcagaattaatttctgcaagcaaatcacctgaagaaattaaagattatattggcgctgattcattagcatatctatctgtagatgggttaattgaatcaattggtttagattatgacgcgccatatagtggcttatgtgtagaaagtttcactggagattatcctgcagggttatatgattatgaagcaaattataaagcacatttaagtcatcgacaaaagcaatatatttctaaaaacaaacacttttttgatagcgagggaaatttaaatgtctaaagcatatgaacaatctggtgtaaatattcatgctggttatgaagctgtagaaagaatgtctagtcatgttaaacgtacgatgcgtaaagaagttatcggtggtttaggtggattcggtgctacatttgatttatcacaattaaatatgacagcaccagttttagtttctggaacagacggagtaggtacgaaattaaaactagctatcgactatggtaaacatgattcgataggtatcgatgcagtcgcaatgtgtgttaatgatattttaacgacaggtgcagaaccattatattttttagattacatcgctacaaacaaagttgttcctgaagttattgaacaaattgttaaaggtattagtgatgcatgcgttgaaacgaatactgcacttatcggtggagagactgctgaaatgggtgaaatgtatcacgaaggcgaatatgatgtagccggatttgcagttggagcagttgaaaaggatgactatgtagatggttcagaagtggaagagggacaagttgttatagggcttgcgtcaagtggcattcattcaaatggatacagtttagtgcgcaaattaattaatgaatcaggcattgatttggcatcaaacttcgataatcgtccatttatagatgtctttttagagccaactaaattatatgtcaaacctgtacttgctctgaaaaaagaagtttctattaaggcaatgaatcatattactggtggaggtttttatgaaaatattccacgtgcattgccagccggatatgctgctagaattgatactacatcatttccaacgccaaaaatatttgattggttacaacaacaaggcaatatagacaaaaatgaaatgtataacatttttaatatgggtattggctatacggttatcgttgatgaaaaagatgtatcacgcgctttgaagattttagcagaacaaaatgtggaagcctatcaaattggtcgtattgtgaaaaatgagtcaactgcaattgaatttttgggggtataacaatggttaaaattgcgatttttgcatcaggttcaggaagtaactttgaaaatatagttgagcatgttgaatcaggaaaacttgaaaatattgaagttacggcgctatatacggatcatcaaaatgcgttttgtatagatagagcaaaaaagcacgatattcctgtttatattaatgaaccaaaacaatttgattcaaaagcagcgtatgaacaacatttagtaacattattaaatgaagataaggtagagtggattattttagctggctacatgcgtctaattggtccagacttattagcttcatttgaaggtaaaatattgaatatacatccatctctattgccgaaatataaggggattgacgcaataggccaagcatatcatagtggcgatactattactggttcgacagtacattatgttgatagtggtatggatacgggagaaattattgaacagagacaatgtgatattagaccggacgattcaaaagaacaattagaagagaaagtaaaaaaattggaatatgagttatatccaagtgtcattgctaaaattgtaaaataaggagtatgtatgtgatgaagaaagctattttgagcgtatcaaataaaacaggtattgtagagtttgctaaagcgttaacgcaattaaattatgaattatattcaacaggtggtactaaacgtatattagatgaagcaaatgtaccagttcgttctgtttcagacttaacacattttccagaaataatggatggccgtgttaaaacattacatccggctgttcatggtggcattttagctgatcgaaataaaccgcagcatttaaatgaattatcagaacaacatatagatttaattgatatggtagtagttaatttatatccattccaacaaactgttgcaaaccctgatgtgacgatggacgaagcaattgaaaatattgatattggtggtccaacaatgttacgtgctgcagctaaaaactataaacatgtaacaacaattgtacatcctgcagattatcaagaagtattgacgcgattaagaaacgattcgttagatgagtcatatagacaatcattaatgatcaaagtttttgagcatactgcagaatatgatgaagcgattgtacgtttctttaaaggggataaagaaactttaagatatggagaaaatccacaacaatcagcgtattttgtgagaacttcgaatgctaagcacacgattgcaggcgctaaacaattacatgggaaacaattaagctataacaatattaaagatgcagatgctacactagctttagttaaaaagtttgatacacctgctgcagttgcggttaaacacatgaatccatgtggtgttggtatcggtgacacgatagaacaagcatttcaacatgcgtatgaagcggatagtcaatcaatatttggtggaattgttgcattaaaccgagctgtaacacctgagttagcagagcaattgcatagtatctttttggaagtcattattgcaccaaaatttacagatgaagcattagatattttaaaacaaaagaagaatgtaagattattagaaattgatatgactatagacagtaacgaagaagagtttgtttcagtatctggcggatatttagttcaagataaagacaattatgtcgtgccaaaagaagaaatgaaagttgttacagaagtagcacctacggatgaacaatgggaagcaatgttattaggatggaaagttgtaccatcagtaaaaagtaatgcaattattttaagtaataataaacaaactgtaggtataggtgctggacaaatgaatcgtgtcggtgctgctaaaattgcgttagagagagctattgaaatcaatgatcatgtagcgttagtatctgatggatttttccctatgggagatacagttgaacttgcagcacaacatggtataaaagcaattatccaaccgggtggttcgattaaagatcaagattcaattgatatggctaataaacatggtattgcaatggtagtcacaggcactcgacattttaaacactaattttaaaggggcgtaacataaatgaatgtattagtaattggtgctggtggacgagaacatgcacttgcatataaacttaatcaatcgaatctagttaaacaagtgtttgtcattccaggtaatgaggcaatgacacctatagctgaagtacacactgaaatttcagaatctgatcatcaagggatactagattttgctaaacagcaaaatgttgattgggtagttataggtccagaacaaccgctaattgatggattagcagacattttacgagcgaatggtttcaaagtgtttggtccaaataagcaagcagctcaaatcgaaggctcaaaattatttgctaaaaagataatggaaaaatataatattccaactgcggattataaagaagttgagcgaaaaaaggatgctttaacatatattgaaaactgtgaattgcccgttgttgtcaagaaagatgggttagctgctgggaaaggcgttattattgcagatactattgaagcagccagaagtgctattgagattatgtatggtgatgaagaagaaggtactgttgtatttgaaacgtttttagaaggtgaagagttctcgctaatgacatttgttaatggtgatttagcagttcctttcgactgtattgcacaagatcataaacgcgcatttgatcatgatgaaggaccaaatactggtggtatgggggcttattgtccagtaccacatattagtgacgatgttttaaaacttacaaatgaaacgattgcacaacccattgcaaaggcaatgcttaatgaaggttatcaattcttcggagtattatacattggtgctattttaactaaagatggtccaaaagtaattgaatttaatgcccgttttggtgatcctgaagctcaagtattattaagtcgcatggaaagtgatttaatgcagcatattattgatttagatgaaggaaaacgtactgaattcaaatggaaaaatgaatctattgtaggggtcatgttggcatcaaaaggatatcctgatgcatatgaaaaagggcataaagtaagtggctttgatttaaatgaaaactattttgttagtggattaaagaaacaaggtgatacctttgttacttcaggtggtagagttatacttgctatcggaaaaggtgacaatgtacatgatgcacagcgagacgcatacgaaaaagtatctcaaatacaaagtgaccatttattctatcgtcatgacattgcgaataaagcactacaacttaaataagtatatttaaaaatactaagattagctatgaacgaatctataacaatagattttttcatagcttttttagttgtagagtctaggacattgatttctgtaccaaatttgtgattatgtatatgtaatacaaaagaggcgccacaacatgtttggatgaacaaaataacatgtttgtggcacctcttttgtttagtatggaataaatggttttctttttctatacaatgaatttctaatttagtatctatacaattatggataaaatttaacctacacgaccaagacgaacatcatctatgcccgtgatgggtaaggtgattgaacaataatatgccaaagtaataatggcaattaaaactataataaagattacatctttatatgagaaaggtacgttgtaatagtaagtacgaggaccatctctaaatcctttcgactccatcgcaactgataattgatgagcctttctaatgttttggcttaatagaggtatgattaaatgcttaaatcgctttaatcctctataatttgctacgtctatcatctgatagcgcatttttaaagatctgcgaagctgtattaaagaactaatcattaaaggtatcatacgaatggcagccatgaatgcataagcaacttttgatttaacctttaaatgttgcattaaactataaaaaatcatgacaacctgagatgtgagtgcgattaagataccgaaaaatgaaatagcaatagttcttaatgatacatgtaaaccacgaactaaactttctgttgtaatatggataaatccgaatttcaaaattgtatggctaccattcccgtataaaatcatgaacagggaagagagtaatgcaaagccaatacttatagttataaaaattgctgtaattttaaactgagtaccattaaacatcaataagaaaactaacattaagatagtgatataaagcataaaatcgaaattatgcacaaatataataaagaaaaatagtataattccaagaaatagtttcgttataatgttgacatcatcaacaaatgattgccgaactttccattgctcatacattcgtatcaccatcacaatctagtaacgcaccatctgaaattttaagtcttcttgatggataacgttcaattatttcatcgtcatgtgtaaccatgacaatactttgtcccaaattaattcgtttttggaaaagtttgatcaactggaatgtattatggctatcaagtccaaatgtcggttcatctaaaaagatgatatcagctttagaacttagtgcggtagctacgctaaggcgtcgtttttgaccaatagacaactcataaggatgttgatcttttacattttctaaatctaaaagttttaaaagttgtatcgtttcatcatcactttgatctttagaaaggtgattaaaatgaatgttaatttcatcataaaccgaatttgttataaattgtaactctgggttttgataaactaaatacatgtgttttgctgcatgtttaatttttgttaaacgctgattttcaaaataaacatcaccttgatatttaatcaattgcataattgattcaagcaaggttgttttaccactaccatttgcccctgtaattgtaatccactcacctagaccaatttctaaatctgagaatgagagcaatgttgatttaccgcgaataatacgtccatttttaaattgtaataagtgtgagtttgttgttggaaagtcaacacgacttggagcgaattcccatgcacgtggatgccacacaccatattcactgagtaaatgaacatacttctgtaatatgatttcaggacattcatcggcaatgatatttccgttataatccatcaaaatgacgcggtcgacatgattccagatgtgtttaactttatgttcaacgattacaacagtttgatcttcccaaagttcaattagtttagtccataaatcttctgttgcttgaacatctaacattgctgtcggttcatctaaaaacaatgtttttgattgttgaagaatggtttcaacaattgccaatttctgtttcataccgccacttaaatctttgatatacgtttcaggggtaacatttaaattgaccatatttaaagcattgataattaacgcatccatgtcttcacgtggtacttgtctattttctaaaacgaatgcaagttcttcgtatacttttggcatacaaaactggctatcagggtcttggaaaataacaccacttaatgggtcaacgattagttcatcatatttcataggtaattcaattaaattaggaacaataccacttaatacattcagaagtgtacttttaccgcaaccagaaggaccgagtaaaagtactttttctttgtcttgaatattgatatttaaatgatcgaaaattttacgctgaccatttggatattttaatcgtaaatcacttacttttaacactctgaatggctcctcttataagttgtcgtaatcttctttagcagctggtctaaataattttgttacacctgtcttatctaaagcttttactaaaaggtaagacaggacgccggcgactactgcaccactaattaatctaaatactatgaataatgttaagttccaacctgcaacttcatttaaataaccatagaaataatctatcgggaaagccgcgattgctgtacaaaaacctgctaacatagctaccataactgaacgagattgatatttaaaaattgcaaagacaagttcacacgctaaaccttgtataaaagcgtaaacaattgtcggaatatcgaaacgacccataatgatagtttcgccggcacctgcagcaaattcagccagtaaagcaatacctggttttggaataattagatagcagacaatcgctgccatgaaccaaaccccgtttgttaattgttcgaggtgaaggcctgtagcttgcacaccattgtaaacaaaccaccataaattgtaaataactgcgaatactactgaaataagtacggttactagtatttcagatagctttaaaccttttgacatttttacatcctcctaataaaaaaacgcacaaccatccataggaaagttatgcgttcacaatatatattagtaaaacatatgtatagtaacactttcctacgctagttcaagttagatcaggttcaaagggtttgagggcaagcctcatctcagtataaaacacccctagtgtgtgcgatttatttaattaattatactgtaagacgtttgtaaacttatgtcaataggttgtcttcatgaaatttcgtttaattcgatttaaaatttataatattagcattggatttaaattgaagatgtagtaggaatgttagtaattaaagatataaaaatatgtgacatgtaataatattgagctgataaatgaagaggggtacttatcaatcatacctttttaacaacagtgaagaatccgtgcataatggcttataaattatagtttgtaaggtaaaagagggatacttgcgccgagcacaagcataaaagcccctaacaactaaaagttgtaaggtaaaagagggatacttgcgctgagcgcatgcataaaagcccctaacaactaaaggttgtaaggggctctaaattaatttagtgtatcttggatatcttgttttgtttgattaatatcttctgttttttcttcttttttatcttttaatttttcttcaacttctttagctttttctgctgcttttttattttgattttcatttgacatgattaattcctcccaaattggataattatttatatataaatcttacccggttgtactttcgttaaacttttctaagtctatagcactatttattcatttatctaaagacaacaacattagattaatatataatgattttgaggtgaacataatgtcttttcttaggaaacacgccgaaattatttttagctatttaatcggtatcgtttcactcttcactggtctcattattttaattaacttgccattaattaaacaattaaatggtggtaaaaaagttgatacacatgttcataatgtgtgggaatttctgaatgcatttttcagtgaaattattaaagtaatgagtcgatttataggtaatttccctatagttagtgcaattgtgataattatattcggtattttagttatgttgattggtcatacattacttagaactattaagtatgactatgatatttctatctttttcttagttatcggtatcatgtactttattattactcttatattaatgacacaagtttatggattctttgcagtgattttcattattccatttacaattcatataggatatatcgtctataaagatgaattgaatcaggaaaatgtaaaaaatcatttcatgtggataattgtgagttatggtataagttacttaattacacaaattgcattgtatggcagaattgatgctaatgaaatagagtcaattgatatcttaagtgtcaatgctttctttataattatgtggttacttggtcaaatggctatttggaatttcttgttcttgcgccgagctttacctttaacaaagcaagaattaggtgaagaggagccagaattatcaagaacaagtaaagggaatgtcacgaatcaaactaaaattcacttgaaacaactccaagataagactacagaatatgcacgtaagacaagaagaagtgtcgatttagataaaattagagctaaaagagataaattcaaaaagaaagttaatgatattatcgatattcaagaagacgatattcctgattggatgagaaaaccgaaatgggttaaaccaatgtatgtcgaactattttgtggtgtcgtcatctttttattcacatttttagaatttaataatcgtaatgcattatttgtatctggtgattggaaattatcacagacacaatatgttattgaatgggttacattactaattctgctattcattattatcgcatatatcgctacaacgttaactttccacttgaaaggtaagttttattatttacaactatttatggggagcattttattctttaaattgttaacggaatttataaatataatgattcatggactactactttcagtgttcattacgccaacattactattaatgttattggcaatcatcatttcttattcgttacaattacgagagcgaccataattaaaagcattataaaagtactatctattaaacattttgatgtgtacgctataagttagatttatctctaacttatttagatacaggtcaatgaagtttatggatagtacttttttgtaactagatttgattgattcaggtgatgtgaattaagtattgaaaattgtatacaaagttttagtgcaaataaaatagttgaaaagttatccatttgtaaaatcaagaaaactagtaaatagttgaagcgacatatggaattggcgaaacgatatatagtatttcctttgtagaaatttaacatatatcattcgaattactaatttgttaaaatcaacagtaagattagaagtagatgatattgaaatttggcaaacaatttaatctatataaaactacaacgatacacagaaaggaagttgtcagatgaaaatagcaactctgaacaaaggcaaagaaacaaaatattttaatggatatcctttaattgaagaagaggatatctattcacaagatcatttaaaagaaggagatatttttcaaattgtgactgataaatcacaatatgttgcaacggcttatgttggtcgccaacataaaggattaggttgggttctaacatacgataaagctcaagaaatcaacacagctttctttgtgaaattgtttaatactgcattagcagaacgtgattattattttaatatagatggaacaaatgcttttagattatttaatgctgaaggtgatggtgttgggggattaacgatcgacaattacgatggccatttgttgattcaatggtactcaaaaggtatttataaatttaaatatgccattcttgaagcggttagaaaagtatttgattataaatctatttacgaaaaagtaagatttaaagacagcgaatatagtggtggttttgttgaaggcgatgcacctgagtttccaattgttatcgaagaaaacttcacattttataacgtagaccttgaagatggtttgatgacaggtatctttttagatcaaaaagaagtgcgcaagaaattaagggatcaatatgccaaagaacgccatgttttaaacttatttagttatacaggtgctttttctgtaatagcagcaagtgaggcatcttcaacaacaagtgtagatttggctaatcgttctcgtagtttaactgaagaaaattttggattaaatgctattgatcctaaatctcaatatatttatgtcatggacacttttgatttctataaatatgctgcacgtcatggacatagttatgacacgatcgtgattgatccacctagctttgcacgcaacaaaaaacgtacattttcagtgcaaaaagattatgacaaattaattaatggcgccttaaatatcttatcatctgaaggaacattattattatgtacaaacgcaagtgtatatccattaaagcaatttaaaaatactattaaaaagacacttgaagagagtggcgttgattatgaattaactgaagttatgggattaccaaaagattttaaaacacatccacattataagccatctaaatatttaaaagctgtttttgtaaatattagacattaatttgataaaaaggggtatagtaacttattgagaaaaagaagggtgataatattatgggattcaaaaataatttaacgtcaaatttaactaataaaattggtaattcagtttttaaaatagaaaacattaatgaaaagggggcaatgcctacgacaattaaagaattaaatgaaagacgacaacgtgctgaagcaattgtaaagaggaagtctttaatgtcatcaacaatgagcgttgttccaattcctggattagactttggtgttgatttaaaattaatgaaagatattatcgaagatgttaataaaatttatggcttagatcataagcaagttaatagccttggagatgatgtgaaagaaagagttatgtctgcagcagcaattcaaggtagtcaatttattggtaaaagaatttcaagtgcatttttaaaaatagttattagagatgtagctaaacgtactgctgcaaaacaaacgaaatggttcccggtagtaggacaagctgtatctgcatcaattagttattattttatgaataaaattggaaaagatcacattcaaaaatgcgaaaatgttattaaaaatgtcatgtaggtgctataatagttttgcaatttgcaaattttactgaaaccggttttaaacgaattgaatttaaagcatggttttggtaaagttaatgtataaaactaagttagtattgtaataatattgaagattctaactatacgaaggagaaatgtaattatggaacaaaattcatatgtaatcatcgacgagactggtattcacgctagaccagcaacaatgttagtacaaacagcttcaaaattcgattctgatattcaattagaatataacggtaagaaagttaacttaaaatcaatcatgggtgttatgagccttggtgttggtaaagatgctgaaattacaatttatgctgacggtagtgatgaatctgacgccattcaagcaatcagtgacgtcttatcaaaagaaggattgactaaataatcatgtctaaattaattaaaggtattgccgcatctgatggtgtcgcaattgctaaagcttatttattagttgagccagacttaacattcgacaaaaatgaaaaagtcactgatgttgaaggagaagttgcaaagttcaatagcgctatcgaagcttctaaagttgagttaactaaaattagaaataatgcagaggttcaactaggtgctgataaagctgctatctttgatgcacatttattagttttagatgaccctgaattaattcaaccaatccaagataagattaaaaatgaaaacgctaatgctgctacagcattaacggatgtaacaacacaatttgttacaatttttgaatctatggataacgaatacatgaaagaacgtgcggctgatattcgcgacgtttctaaacgtgtgttatcacatattttaggtgtagaattaccgaatccgagtatgatcgatgaaagcgttgttattgtagggaatgacttaacgccatctgatactgctcaattaaataaagaattcgtacaaggttttgctacaaacattggcggaagaacaagtcactctgcgattatgagtcgttctttagaaattccagcaattgttggtacaaaatcaattactcaagaagttaaacaaggcgacatgattatcgtagatggattaaatggtgatgtaatcgttaatccaactgaagatgagttaatcgcttatcaagataaacgtgagcgttattttgctgacaagaaagaattacaaaaactacgtgatgctgatactgttacagttgatggtgttcacgcagagcttgctgcaaatattggtacacctaatgatttgccaggtgttattgaaaatggtgcacaaggtatcggcttatatagaactgagtttttatatatgggtcgtgaccaaatgcctacagaagaagagcaatttgaagcttataaagaagtattagaagcaatgaacggtaaacgtgttgttgtacgtactttagatataggtggagataaagaattatcatacttaaacttgcctgaagaaatgaatccattcttaggttatcgtgcgattcgcttatgccttgcgcaacaagatattttcagaccacaactacgtgcattattacgtgcatcggtttatggtaagttaaatatcatgttcccaatggttgcaacaattaacgaatttagagaagctaaagctatattattagaagaaaaagaaaaccttaaaaatgaaggtcatgacatttcagatgatatagaattaggaatcatggtagagatacctgcaacagcagcattagctgatgtctttgctaaagaagtagatttcttcagtatcggtacaaatgatttaattcaatacacattagctgctgaccgtatgtcagagcgtgtatcatatctataccaaccatataacccttcaatcttacgtttagttaaacaagttattgaagcgtcacataaagaaggtaaatggacaggtatgtgtggtgaaatggctggagatgaaacagctattccattattacttggtttaggtttagatgagttctctatgagtgcaacgtctattctgaaagcaagaagacaaattaatggtttaagtaaaaatgaaatgactgaacttgctaaccgtgcagtcgactgtgcaacgcaagaagaagttattgaattagttaacaactacgtaaaataattaattctttcgaaagacagaattataaataaacccgaagtattcattgtgagtaattatgaatacttcgggttcttttttatgatttatgttaatttcaaggaatgttgttgctaactaattaaacaactaggtgtcattggcaaaatgttgttctttaattaatgttaattaatttaaaaatcgatatttaattatgatagctaaaaatgatgaagttgatttagatgaaaattaatcttggatatttaatactttgttgatttcatcaaaatcaacatggtacattggattgccattcaacaaaataaacggagttgaaaaagcatcaaaatctatcatttcgtttcgatattgttgattgttgatatttctttcttcaaaatcaatttgatgctcatttagataattttttacaaatgtacaaggtggacaatcattctgcgtataaacgattatttctgacatgtatcatgctccttcgtgctttattctaatgtaatatacacaattatacattgaaattcaaatttgtgaacacattgtgaactgacataaattatacacaatttcatagcgcataatgttttaaaaatacacattatagcaattataattaagttcattgtgttgtcatcaaaaaaagaaaaaggtgatgtttttaaatggatacagttgaaatcagtcggtttttgatagctatgactttagcagttcatatcatttttgcaacgattggtgttggtatgcctttaatgttcgcaattgcagaatttttaggtattcgcaaaaatgatcttcaatatatagctatggccaaaagatgggctaaagcttatacaattactgtagcagtgggagttgttacaggtacaattataggacttcaattatcattgatttggcctacatttatggaaatgggtggacacgttattgcacttccgttatttatggaaacatttgcgttcttctttgaagctattttcttaagtatatatttatatacttgggaccgttttaaaaataaatgtacacatttcttaattagtataccagtaattattggtggctctttctcagcattcttcattacttcagtgaattcatttatgaatacgcctgcaggttttgagttgaagaatggaaagatggtcaatgttcaacctatagaagcgatgtttaacccatcgtttatagttcgatcatttcacgtaattactacagccggtatgacgatggcatttgttattgcatcaatagcagcttttaaattattgcgtaatcgtcaacctaaagatactgtctaccataagaaagctttgaaaatgtctatgatagttggattcttttcaactttactttctatgttggcaggggatttatctgcaaaatttttgcataaattccaacctgaaaaattagcagcttatgaatggcatttcgatacatcttcccatgccaaattattattatttggtgtgttagatgaaaagactcagcaagttaaaggtgcgattgaattacctggactattgagtttcttagcagataatagtgtcaaaactaaagtgcaagggttaaatgattttccgaaaagtttacatccgcctatgattgtccattatttctttgatttaatggtaacgatgggaattttatgttttgtcatttcaggtgtttatgtcttaactttaatgtttaaaaagcttagaaagttttctactcataaatggatgctttacggaatattattaacaggaccagcttcaatgctagctatagaatttggatggttcttaacagagatgggtagacagccttggattgttcgtggttatatgcgcgtggcagaagcagcaacacaagcaggcggaataaccttcgttacaattttatttggcatattgtacatcattttaatgtatacatgtgcatacgtattaattcgtatgtttaaaaataaaccggcgtatgaagatgtaaatcgtttagccaagaagcaaggaggagaaatagaaaaatgatttatgcatttataggtataacagtgttatggttgtttttattttgctatatcattattgcttctatagattttggggcaggtttcttcgcattgcattcaaagttaactggtgatgaaaagaaaattaatcacttaatttcacgttatttgaacccagtttgggaagttacgaatgtattctttgttttcttcttcgtaggattcgtaggtttctttcctgagtcaatcaaatatttaggcacggtattgttaataccaggttcaatagcactgattatgatatcgttgagaaacagtttttatgcatttgaaaattatggtcaagatacaaaattagcatggatgatcatgtatggggtaagtggattattaattccagcttcattatcaactgctttaactattacagaaggtggttatattaatgttcgaaacaatgttatcgatctagattgggtgcagttactattaagcccatttgcttggtctgtagtattcttggcaattatttcagttttatatatttcatcaggatttttgacatattatgctaaaaaagcaaatgacgaaccagcatataatttaacaagacaatggcacatatttttagggccaccgatgattatcatttgtttattcgtatttctatcattacgcattcaaaattctgaacatttttattcagctgtttttgactactggtggatgtttgctataagtttcttattctttgcattagcttcattgttaacattctttaagaaaaagcatggtttggcttttgtatttgttattttacaaatgatgttcgcgttctttggctatggaattagtaaattgccatatcttttatatccgtttgtaaaaattacagatgcatatgttaatccagaaatgggctggacattagtgattgtctttattttaggtttacttttattacttccatcgttaatattattattaagattatttgttttcgacaaagaatatgttgaaggaaagaaatcataagttgagacgataccccaactttcatttacttgcattactgcatttagataatttagttggggtactcatttataataattttaaatttatattttcaatgaattgatgaaaatcatttaatggagggcgagtatgggtaaagaatatgtagtcatcggtctaggtcgttttggaggtagtatcgttcgtgagttgaatgcattagacatggatgtaatggccatcgaccatgatgaaaatagagtgaatgaatatagtgatatcgctactcatgcggttgttgcagacactacagatgaagcagttatgaaaagtttaggtatccgtaactttgatcatgtcattgtggcaattggtgaaaatattcaatcaagtacgttgacgactttgattttaaaagagttaggtgtaaaaaaagtaactgctaaagcacaaaatgattatcatgcaaagattttaaataaaattggagcagatacggttgtgcaccctgagcgtgatatgggtagacgtattgcgcataatgttgcaagtgcaagtgtacttgattatcttgagttggcagacgagcattctattgtagaattgaaagcaactgaaaagatggcggggcagtctatcattgatttagatataagagcacaatatggaattaacattattgcaattaaacgaggcaaagagttcatcatttcaccaaatccaaatattaatttagaaataggtgatattttaattatgattggacatgataatgatttaaatcgctttgaaaaaaatattgcgacgagataatcgataatcatttatttgatatattcaaataaatatcatatataaagaaaaagctactaacaatgtgtggtgagtttaattaaaacttcacttcaaagttagtagctttttgattatttattgtttgattctttttgttcgtttaccttcataatgactggtaaaatcattggttttctagctgttttttcaaataaataaggttgtaatgtttctatgatagaagatttaatctgatgccattgaatatctttattttgatttaacttactaataacatcagttttgattttgcgttgtgcatcataaattaattgacctgattctctcatatatacaaatcctcgagaaataatgtctggaccagaaagtaatttatttgtattaaaatcaatactaacaacaacgataactaaaccttcttcagataatagcttacggtctcttattacaacattaccgatatcaccaataccactaccatcaacaagtacattaccagatggaatgcgaccagctttacgtgctgaatcgtgtgttagagctaagacatctccgatatcaaagatgaagacattatcttcttcaacgccgcattcaacaccagtctcaccatgtgcttttaacatacggtattcaccatgaataggtaagaaatatttcggcttgattaatcgaagcattaattgttgatcaccttgagaaccatgccctgaagtatggatgttagaaatcttgctgtggataacatctgcaccagctttatacaaggaattaatagttctgttaatactttttgtattacctgggataggtgatgaactaaatacaacggtatcttcaggtataattttaatttgcttatgagtaccattagcaattctagataatgctgccattggttcaccttgagaaccagtacatagtatcaataactcatgcttcggtacggtattaattttattaggctcaataaatgtttcaggtggtgctttaatataaccaagttccataccgattttaatattgttttccatcgaacgaccgaacgtaacaattttacggttatttttgatagcagcttcaactgcttgttgaactcggtaaatattagaagcgaaggtagcaaatataatacgacctttacagttacggaagatcttatctacgttttgaccaacttcacgttcgcttaaagtaaaatcaggcacaagtgaatttgttgagtctgaaagtaaacatagaacgccttcttcgcctaattgagccattttagcaatgtttgctggtttgcctacaggtgtaaaatcaaatttaaagtcaccggtatgaactacttttccttcaggtgtatctacgatgacgccataagtttcaggaatactatgcgtagttaagtagaaagaaatcgtaaagtgcttagattttatcacactgtcctcattgatttcatttagtttagcagtacgtaataaatgatgttcttcaagtttattacggattaaacctaatgctaaaggaccaccataaataggtatattaagttgttttaataggaagggcacaccgcctatatggtcttcgtgaccatgtgttataaataggccaacaattttatcttggttttgaactagatatgtgtagtcaggtataacataatcaatccctaataagttatcatcagggaatttgatacctgcatcgataatgacaatttcgtctttatactcaactgcataagtatttttaccgatttcacctagacctccaagtgcatatacacctacttcatttggatgtaattgtttcattatttagcaatctccacattaaagtgttctgagttttctttttcgtaatctaaatgtgcgccctctaatttagtgataaattcgatattaaaattacgatctttcaagtaacgacgtacttgttcttctgtttgagcttcaacataaagtgattgtgtattttcacgcacaattacctcgtctctgttatgttgataaaaaactttaaatactgccatgttaaaaattcctcctaagaatgtttgtttaatttattgttaaccctagtaaaatcgtattggagtatatatcgataaattcattccaatcatctctataatttaacttaataacgatttggttaataactaggttcatcatgtcgttcattttaaaaaattagtgaaataacactaaaatttcagttaaatcttattttacatgatgaatgataataaataaagcagtttatctcactagaaatctaagtatttcgaataaatgtgcagttctatttattaaaataaatgtagagattataaattaatgttaagaaagaattaaaggattttatatgaaacggtaaaatttaaatgaggggataaaaagtttggtagaaaggtgaatatattttactgttatttattaggaaaagttgtaaaagaaaaagcttaggacatcatatttatcctaagctttgataattagtaatagtgtgttttaaacttctactgcatctgtatgtggttgtaatgggtggtctttgtcaatgtgatcatagaacattacaccatttaaatgatcaatttcatgttggaaaacaattgctggatatccttttagacgtaattgtatatcattaccttcgatgtctttggctttaattgtaattctattatgacggtgaactagaccagcaacattatcatcgacactaaggcaaccttcaccagttggtaaataggcttcttgaacactatgacttacaattttggggttcacaagcatatagtcataagatttgccactgccatcatctggtattagaacagcaatcatacgtttagaaatattaatttgaggtgcagccaaaccaacgcctgaacgtaaaccgtatcgtttcgcgatttcctcatcttgactatttactaaaaactctctcatggcgattaatgtttctttttcttctttagttaatggtaattctagctcggctgctttttgacgcaaagttggatgaccatctctaatgatgtctttcattgttaacatatattgcaccttccttattttaatttgttttagttgaatgacagtaaaaaggttgttaagatactcatacatttttatgtgtatgtatgtacaaagttaaccaactaccgccaaggtttattttagatagtatatgtaaattttcagatatgctaattgcctaaaaaatgattaaagtgttgatttcaagcaatgatactttagaaatttatttatcatcttgactttaaaaattatattataaatgacgtaactgtcaacagatatacttagtaatgaagatgtgtaatgtaattgtttaaaattgatttccaagcagattttatttatcatttaatttaaatagcaagtggaggtacaagtaatgaaatttggaaaaacaatcgcagtagtattagcatctagtgtcttgcttgcaggatgtactacggataaaaaagaaattaaggcatatttaaagcaagtggataaaattaaagacgatgaagaaccaattaaaactgttggtaagaaaattgctgaattagatgagaaaaagaaaaaattaactgaagatgtcaatagtaaagatacagcagttcgcggtaaagcagtaaaagatttaattaaaaatgccgatgatcgtctaaaggaatttgaaaaagaagaagacgcaattaagaagtctgaacaagactttaagaaagcaaaaagtcacgttgataacattgataatgatgttaaacgtaaagaagtaaaacaattagatgatgtattaaaagaaaaatacaaattgcatggtgaatactctaaagcttataaaaatgctgtcaattcagaaaaaacattgtttaaatatttaaatcaaaatgatgcgacacaacaaggtgttaatgaaaaatcaaaagcaatagaacagaactataaaaagttaaaagaagtatctgaaaaatatacaaaagtactaaataaggttggtaaagaaaagcaagacgttgatcaatttaaataattaatatgatacagatggtaggaaacaactaatacagttcctattatctgtatctttttttattaaaacagaactttttcaaatggtttaacagtcccatttatttgtggtacaattagtaaggataaaatgaatttctatacaattatgggaaaggtatggtgaattgaatggctcctaagttacaagcccaattcgatgcagtaaaagttttaaatgatactcaatcgaaatttgaaatggttcaaattttggatgagaatggtaacgtcgtaaatgaagacttagtacctgatcttacggatgaacaattagtagaattaatggaaagaatggtatggactcgtatccttgatcaacgttctatctcattaaacagacaaggacgtttaggtttctatgcaccaactgctggtcaagaagcatcacaattagcgtcacaatacgctttagaaaaagaagattacattttaccgggatacagagatgttcctcaaattatttggcatggtttaccattaactgaagctttcttattctcaagaggtcacttcaaaggaaatcaattccctgaaggcgttaatgcattaagcccacaaattattatcggtgcacaatacattcaagctgctggtgttgcatttgcacttaaaaaacgtggtaaaaatgcagttgcaatcacttacactggtgacggtggttcttcacaaggtgatttctatgaaggtattaactttgcagcagcttataaagcacctgcaattttcgttattcaaaacaataactatgcaatttcaacaccaagaagcaagcaaactgctgctgaaacattagctcaaaaagcaattgctgtaggtattcctggtatccaagttgatggtatggatgcgttagctgtatatcaagcaactaaagaagcacgtgaccgcgcagttgcaggtgaaggtccaacattaattgaaactatgacatatcgttatggtcctcatacaatggctggtgacgatccaactcgttacagaacttcagacgaagatgctgaatgggagaaaaaagacccattagtacgtttccgtaaattccttgaaaacaaaggtttatggaatgaagacaaagaaaatgaagttattgaacgtgcaaaagctgatattaaagcagcaattaaagaggctgataacactgaaaaacaaactgttacttctctaatggaaattatgtatgaagatatgcctcaaaacttagcagaacaatatgaaatttacaaagagaaggagtcgaagtaagccatggcacaaatgacaatggttcaagcgattaatgatgcgcttaaaactgaacttaaaaatgaccaagatgttttaatttttggtgaagacgttggtgttaacggcggtgttttccgtgttactgaaggactacaaaaagaatttggtgaagatagagtattcgatacacctttagctgaatcaggtattggcggtttagcaatgggtcttgcagttgaaggattccgtccggttatggaagtacaattcttaggtttcgtattcgaagtatttgatgcgattgctggacaaattgcacgtactcgtttccgttcaggcggtactaaaactgcacctgtaacaattcgtagcccatttggtggtggcgtacacacacctgaattgcacgcagataatttagaaggtattttagctcaatctccaggtctaaaggttgttattccttcaggcccatacgatgcgaaaggtttattaatttcttctattagaagtaatgacccagtcgtatacttagagcatatgaaattgtatcgttcattccgtgaagaagtacctgaagaagaatatacaattgacattggtaaggctaatgtgaaaaaagaaggtaatgacatttcaatcatcacatacggtgcaatggttcaagaatcaatgaaagctgcagaagaacttgaaaaagatggttattctgttgaagtaattgacttacgtactgttcaaccaatcgatgttgacacaattgtagcttcagttgaaaaaactggtcgtgcagttgtagttcaagaagcacaacgtcaagctggtgttggtgcagcagttgtagctgaattaagtgaacgtgcaatcctttcattagaagcacctattggaagagttgcagcagcagatacaatttatccattcactcaagctgaaaatgtttggttaccaaacaaaaatgacatcatcgaaaaagcaaaagaaactttagaattttaatacattttaaaagttaacgaagttagcgtattttagtctcattgattaaaatgaaatgtttaatttacgaaatcttaggagggcaaaaacgtggcatttgaatttagattacccgatatcggggaaggtatccacgaaggtgaaattgtaaaatggtttgttaaagctggagatactattgaagaagacgatgttttagctgaggtacaaaacgataaatcagtagtagaaatcccatcaccagtatctggtactgtagaagaagttatggtagaagaaggtacagtagctgtagttggtgacgttattgttaaaatcgatgcacctgatgcagaagatatgcaatttaaaggtcatgatgatgattcatcatctaaagaagaacctgcgaaagaggaagcgccagcagagcaagcacctgtagctactcaaactgaagaagtagatgaaaacagaactgttaaagcaatgccttcagtacgtaaatacgcacgtgaaaaaggtgttaacattaaagcagtttctggatctggtaaaaatggtcgtattacaaaagaagatgtagatgcatacttaaatggtggtgcaccaacagcttcaaatgaatcagctgcttcagctacaaatgaagaagttgctgaaactcctgcagcacctgcagcagtatcattagaaggcgacttcccagaaacaactgaaaaaatccctgctatgcgtagagcaattgcgaaagcaatggttaactctaagcatactgcacctcatgtaacattaatggatgaaattgatgttcaagcattatgggatcaccgtaagaaatttaaagaaatcgcagctgaacaaggtactaagttaacattcttaccatatgttgttaaagcgcttgtttctgcattgaaaaaatacccagcacttaatacttcattcaatgaagaagctggtgaaattgtgcataaacattactggaatatcggtattgcggcggacactgatagaggtttattagtacctgtagtgaaacatgctgaccgtaaatctattttccaaatttctgatgaaattaacgaattagctgttaaagcacgtgatggtaaattaacagccgatgaaatgaaaggtgcaacatgcacaatcagtaatatcggttcagctggtggacaatggttcactccagttatcaatcacccagaagtagcaatcttaggaattggccgtattgctcaaaaacctatcgttaaagatggagaaattgttgcagcaccagtattagcattatcattaagctttgaccacagacaaattgatggtgcaactggccaaaatgcaatgaatcacattaaacgtttattaaataatccagaattattattaatggaggggtaaaacatggtagttggagatttcccaattgaaacagatactatagtaatcggagcaggtcctggtggatacgttgcagcaattcgtgcagctcaattaggacaaaaagtaacaatcgttgagaaaggtaatcttggtggtgtttgcttaaacgtaggatgtattccttcaaaagcattactacatgcttctcaccgttttgttgaagcacaacattctgaaaacttaggtgttattgctgaaagtgtttctttaaacttccaaaaagttcaagaattcaaatcatcagttgttaataaattaactggtggtgttgaaggcttacttaaaggtaacaaagttaacatcgttaaaggtgaagcatatttcgtagataacaatagcttacgtgttatggacgaaaagagcgcacaaacatacaactttaaaaatgcaatcattgcaacaggttcaagaccaattgaaattcctaatttcaaattcggtaaacgtgttatcgactcaacaggtgctttaaacttacaagaagtaccaggtaaattagttgtagttggtggaggatacattggatcagaattaggtacagcatttgctaactttggttcagaagtaaccatccttgaaggtgctaaagatatcttaggtggcttcgaaaaacaaatgacacaacctgttaaaaaaggtatgaaagaaaaaggtgttgaaatcgttactgaagctatggctaaatcagctgaagaaacagataacggagttaaagttacttatgaagctaaaggcgaagagaaaacaatcgaagctgattatgtattagtaactgtaggtcgtcgtccaaacacagacgaattaggcctagaagaattaggtgttaaattcgctgaccgtggattattagaagttgataaacaaagccgtacgtctatcagcaatatctatgcaattggtgatatcgttccaggtttaccacttgctcacaaagctagctatgaagctaaagttgctgctgaagcaattgatggtcaagctgctgaagttgattacattggtatgccagcagtatgctttactgaaccagaattagctacagttggttattcagaagcgcaagctaaagaagaaggtttagcaattaaagcttctaaattcccatatgcagcaaatggtcgtgcattatcattagatgatactaacggatttgttaaacttattacacttaaagaagatgatactttaatcggtgcccaagtagttggtactggtgcatcagatattatctctgaattaggtttagcaattgaagctggtatgaatgctgaagatatcgcattaacaatccatgcacatccaacattaggtgagatgactatggaagcagcggaaaaagctatcggatacccaatccatacaatgtaataactgattatctataaagattcagtcattaaaagctgtagcatatgctacggcttttttgttttaggtaaagtagtgtaaggaaattgatttgagatatcgttaacatgtgacatgcatgttatactagcgatgctaacaaaagaattgaaatggaggcgttcaacaatggaatatgagtatccaattgatttagactggagtaatgaagagatgatttcagtgataaatttctttaatcatgtagagaagtattatgaatccggcgtgacggcaggcgactttatggatgcatataaaagatttaaagaaattgtgcctgctaaagcagaggaaaaacaaatttttaatactttcgaaaaaagtagtggctataatagttacaaagcagttcaagatgtaaaaaatcactctgaagaacaaagagtaacagctaaaaaataattcgttcgaaattaacacaatttaataggattttttctttaaaactattgctaataaagctatattttgatacctttatcaagtgttaaacaaaatgtttgataaaagtaaacttaatatagcttttttaggtggaaaaataaatgaacataggtaataaaattaaaaatcttagaagaattaaaaatttaacgcaagaagaacttgctgaacgtacagacttatcgaaaggctacatttcacaaatagaaagtgaacatgcctcaccaagtatggaaactttcttaaatattatagaggtgttaggaacgacgccaagtgaattttttaaagacagtgaaaatgaaaaagtattatacaagaaggaagaacaagttatttatgatgagtatgatgaaggttatatattaaattggttagtttcaaagtcaaatgaatatgatatggagccattaatattaactttaaagcctggcgcatcatataaaaatttcaatccatcagagtctgatacgtttatttattgtatgtcaggtcagataacacttaatttaggcaaagagatatatcaagcacaagaagaagacgttttgtattttaaagcacgagataatcatcgtttgtcaaatgaattaaacaatgaaacacgaatacttattgtagcgacagcttcatatttataggggggatcttatttggaaccattattatcattaaaatcagttagtaaaagctatgatgatcttaatatcttagatgacatagatattgatattgaatcaggatacttttatacattattaggtccttcaggttgtggtaaaacaacaattttaaaattaattgcagggtttgaatatcctgacagtggtgaagtgatttatcaaaacaaaccaattggtaatttaccgccaaataaacgtaaagtgaatacagtctttcaagattatgcattatttccacacttaaacgtctatgataatatcgctttcggtttgaaattaaaaaaattatcaaaaactgaaattgatcaaaaagtaactgaggcattaaaattagttaagctttcaggttatgaaaaaaggaatattaatgaaatgagtggcggacaaaagcaacgtgttgcaattgcacgtgctatcgtaaatgaaccagaaatattattgttagatgaatctttatccgcattagatttgaaattgcgtactgaaatgcaatatgaattacgagaattgcaatctagattaggtattacatttatatttgtaacacatgatcaagaagaagcgttagcattaagtgactttctttttgtattaaaagatgggaaaattcaacaatttggtacaccaacagatatatatgacgaaccagtgaatcgatttgtagctgattttattggagaatctaatattgttgaagggcgcatggttagagattatgtcgtgaatatttatgggcaagatttcgaatgtgtcgatatgggtattcctgaaaataaaaaagtagaggtcgttattcgaccagaagatatatcattaatcaaagctgaagaaggattatttaaagcaactgttgattctatgttatttagaggggtccactatgaaatatgttgtatagacaataaaggttatgaatgggtaatacaaacgactaaaaaagccgaagtaggcagtgaagttggtctttattttgatcctgaagccattcatattatggttcctggagaaacagaagaagagtttgataaacgtattgaaagctatgaggaagtagacaatgcgtaatactaataaatttctcttaatcccgtatttactatggatggttatatttattattgtaccagttgtattactcatttatttttcatttttagatatcaatggacattttagtttcacgaattatcaacaaatttttactaaaaaatatttaaaaatgtttgcatattcaattttatatgccgctttaataacaattattacgttggctatcagttatccagctgcctattatattactcgctcgaaatttcaaaatatcttattaatgataatgattattccaacatggataaatttattgttaaagacatatgcttttataggtttattaagtcatgatggcgtgattaatcaatttttccacttatttaatttaccatcattcaatttgttatttacaactggtgcgtttttagtagtggcaagttacatttatataccatttatgattttacctatatttaatagcatgaaagcaattcctaataatttattgcaggcctcaagtgatttaggtgctagtcctttctatacttttagaaaagtaatcatgccgttaacaaaagaaggtgttatgactgggattcaagtaacctttattccatcactttcattatttatgattacaagattaattgcaggtaataaagtcataaatataggtacggcaatagaggaacaatttttaacaattcaaaattatggtatgggatcaactatagctttattcttaattgtatttatggcattcattttaatcattacaaaatcatctaatgggagagggtgaatcatatgaaatggtatggaaagctgtatatcgggatacttttagcgattttatacatcccaatattctttttaatgttctattcattcaattcggctggtaatatgattcactttgaacattttacattagagcattatcaatcattatttcaaaatgatcatttaatgtcggtcatttttaatacgatagctgtagcacttttagcagcctcaatttctacagttattggtacatttggtgccattgctatttattatttaagaaataaaaagtttaaagtaactttactaacattgaataatgtcttgatggtatcatccgacgttgtcataggtgcatcattcttaattatgtttacaacgattggccattttactggtcttggtttaggattttggacagttctaatatctcatattgcattttgcatacctatagttgtgattatcgtcttaccacaactgtatgaaatgaataataatatgttaaatgctgcaagagatttaggagcgactgaaccacaattattaagcaacattattattcctaatattttaccttctattataggaggattctttatggctttaacttattcactagacgatttcacagtaagtttcttcgttactggtaatggctttagtgtgttatcagttgaagtttatgctatggcgagaaaaggaattagtatggaaattaatgcgatttcaacattattgtttgctgttattgtattaggaatactaggatattatttgattcaatacgtgataaataagaaaaaactaatcaagcgaggtgtaaaataatgaaacgttttttacaactcattataggtgcattagttgtgggtatgctttgtcttactttaagtcattggtttaaatctaaagaacaagtgcatacaaatcaaaaaatttacgtatacaattggggcgaatatattgatccagagttaattaagaaatttgaaaaagaaactggcattcaagtcgtttatgaaactttcgattcaaatgaagcgatggaagccaaaattcgcaatggcggtacacattatgatgttgcttttcctagtgaatatacagttcaaaaattaaaaagagatcatttattgttaccaatagatcataataaggtacctaatattaaaaatttggattcagattatatgaatatgtcatttgataaaggcaataaatactctttaccttatttctttggaactgtaggtattttatataataaagaaaagtatccaaatgaatcatttgatagttggaagtcgttgtataatcctaaatttaaaaaccaaattttactagttgacggtgctagagagattataggcatgagtctcaacaaacttgggtataatcttaatgaccgtaattcgcaccatctaaaagaagcagagcgagatttaactaaattagcaccacaagtaagaggtgtcgtaggtgatgaaattaccatgatgcttgaacaaaatgaaggtaacattgcggttgtttggagtggtgttgcagcacctctagtgcaagaaggggataaatataactatgttattcctaaagaaggatcgaatttatggttcgacaatatggtaattccaaaaacggcacaaaataaagagggtgcatataaatttatgaattttttattagatgctaaaaataacaagcaaaatacagaattcgtaggctatgcaacgccgaacaaggctgcacgacaattgttgcctaaagagattaaagatgaccatcgtttctatccgactaagaaagagcaagaacgccttgaagtttataaagatttaggacctgaagttttaagtgaatacaatgaaaactttttgaatttcaaaatgtcattaaaataaaatcataaatagtagttatttactgtatatttagttataataacgggataagtactataaggagttgtaacgaatggctggagaacaatttactcaaattaaacgtccagtaagtagattaactgaaaaagttctaggttggttatgttgggtgatgttattagtgcttactgtcattacgatgtttatagcacttgtttcattcagtaataacacatcgattgctaatcttgaaaatacattaaataataatgcatttatccagcaattattagctggaaatggctataatacaacacaatttgtaatatggttacaaaatggtatatgggctattatcgtttactttattgtttgtttgttgatttcatttttagctctcatatctatgaatataagaatcttgtcaggtttcttattcttaatatcagcaattgtaacgattcctttagttttacttatcgttactttaatcattccgatcttattctttattattgcgatgatgctatttataagaaaagataaagttgaaatggttgcgccacaatattatgaagagtacaatgggccgatttatgattatcgtgaacctgtgtatgagcgcccacaaccgaaagatgattattatgatgtgcctaaatatgaaaaagaattggataaatcaaacactgtatatgatcaagaacaggaaagagataaatatgatcaatttcctaaacgagcagttgaaagtgaatataatcatgatgagcgcactgaggaagaaccatcagtattatccagacaggctaaatacaaacaaaaaagtactgaagaactaggtattgaagatgatggttattatgcagaacctgaagttgatccaaaagaattgaaagcacaacaaaagcgagaaaaagctgaaattaaagctaagaaaaaagaaaaacgtaaagcttataaccaacgaatgaaagaacgtaggaaaaatcaacctagcgcagttagtcaacgtcgaatgaattttgaagagcgacgtcaaatttacaacaatgatatttctgaagaacgcaattcaagtgaagttaaggacaaaaaagagcaagaataaatattgatgatacccagattagtaagtagaggtcttttgcttattaatctgggtttttatatgaggttaattatcgataacttttaattaaagtgtttaggtgtcaaaattttaaatgacgatttctcattaccatacacctaaattaccatcaatctgaattcagatgtttattataaaaattagatgaaaaatatgttaatatacaagtaaattaatgtgcgtatatctataggctcgtagtatacttattaaaatattaaacaaagaaaggattttatgatgaatagaaaacctgaattaatcatggcttggattgcaaatagtattagtattatttatttattagttatggggctatcctatttttctttaaaaagtggcaatgcatcacaacgtgaagaattagcgaagcaattatctcagaacggtggcaaggtttctttagatatgcttcagacaacaattggtgcattagcaattattttattaatttcaacactttatggtatatttgcgacaatttgtattaaagggcgtagaaaattatcgattatactttttgttatcgcgataattgtaagtttgatggctcttaatttaattgcaattgtcttatggatcatcgtgatgattatgttgatttctaaaaaagaatcaaaagaaactacacataaggacgatgagtatatttatcattaatatgttcatagcaaaagaaaaaccattaaaatgttaagttgttaattattagatacaaccaacattttaatggttttatttttaaccttgtagttcttggaatgtttgaacgattaaatagacatttaaaatacttagaataataataagtgtccatgaaatgatattaacccatgttttattatagaaaggtcccatcaagtctttattactagttgctaattgtaatggtattaaacagaacggaagagcaatacttaagaatacttgagagaatacaagtagctgctcaattttagctgcattacctctaaaaatgattaaacatacgataacaggaatgacagcaagggaacgtgtaattaaacgtcttaaccaatttggtatgtgtaatcttaaaaatccttccattacgatttgtcctgctaaagtaccagtaatcgttgaattttgacctgacgctaataatgcaactgcaaataatgtactcatgattgcacccattgttgcacccagtacaggttcagtttttaaggcatgatataaatcatagaaaccacctaaatcgtcagcgtttgagttgaaaaatagtgatgctcctaacactaataataagcaattgactacaaatgcgattgataactgaatgttcgaatctatcgtagcaaatttaatcgcttgcgccttttcttcattgttatgtcttgagtatgttctagattgtacaattgatgaatgtaagtacaaattatgaggcataattgtagctccaataatacctaatgcaatatagagaatgccgttatttgtaatggtttcactatgtggtataaatccatttaacacagcgttcaactgtggtgatgaaatatagacttcaaatataaagatgaataacactgtgaaaattaatgtaccaacaatagcttcaatttttctaaaaccatatttcattataaatagtagtaaaaatacatcaagtacagttattagtgcaccgacgattaaaggtatgttaaataggagattgagagcaatagcactaccaataacctcagcaatatctgtggcgataattgctagttctgcaataatccaaaagattatagcaataggtcttgataaataatgtcgtgtcatttgagctaagtccatacctgttgctattcctaatctcactgtcatgctttgaagtaacattgctgataaacttgaaataagaattacgaatagcaaagtatagccatattgcgcgccaccttgcattgatgttatccagtttccgggatccatgtaaccaacagcgactaataacccaggcccaagaaatgataaaaatttctgtttatttgaactgcgatgatcgaatttaattgtattgtttatttcgtctaaacttaattgttcatttgttgaatgtcgtttattattcattttgactcacctctacttcttatggacaatataataacctaataaaatgtttaggtcaacctaaatttattttaatttttttaaaagtatgaattattatgttgaatgttcgatttaatggtaagcaaaaagagcacgaaatcatggatgtgattacgtgctctattatttaaacaaagttatttatgcagaataaaatggtaagaactgatcgaaggtttcttctaaaaatgcaataaatgctttgtcactttttaatcttttatcttgtggtgtgattgcacgcgctataaagaattcacctttttttacattgatggctctttgtatcgcttcttttaaatcatcatccgttaaatctttaataaatggtttatcaggtttcatatgatctaagcaaacacgataatcatcaggtaattgttgaatagctttaaattttctttcaaaaacttttgcacgtgttgctttatcttttgcttcatgcatgattccaaacataacaaacagttgatcttcaaacataccaatttggaaatgaggtaacattttatagcctcttttgtttgttgcaaaagcaacccatgtatctttaggaggattcacacttcttctagcatgctttgctacgtgaggataaaatgtttcaccagtttgacttgtaaagaagtcactaaaatattctcctaattcatggagttgtggtcgtatgtattcgtttaaagcttccattcgtgcgtctaagccttctacgttgaacgctttgaaatctttaggtttaaatgtatattttgtcatagagtacctcctgtatagtgtttaaaaatattgtagcatatgttttatcaatagcagcttaagatgctctcattaaaattagtattttcatttttatcttaagaagttatttttataaaatgttgatgtataataaagatgttaggagatgatgttatggcactttatggatttgcccaaggacttattcaagaagcaggaattagaattaaacaattgatggagcaaaatttaacaattgaaacaaagtcaaatccgaatgaccttgttacaaatgtagataaagcaacagaagattttatttttgatacaattttagaaacatatccaaatcatcaagtattaggtgaagaagggcatggtcatgacatcgatacttccaaaggtacggtatgggttgttgacccaatagacggtacattgaattttgttcatcaacaagaaaatttcgcgatttcaatttgtatttatatcgatggtaaaccttatgcaggttttgtatatgatgttatggctgatgtcttatatcatgctaaagtaggggaaggtgcatatcgaggtagccaacccttgaaaacattgaatgattctaatctaagacaaagcattattgggatcaatccgaactggttaactaaaccaattttaggagaaatctttaaagaaattgttaatgattctagaagtgcaagagcatatggtagtgcagcgcttgaaatcgtttcagttgctacaggtaatttagaagcatatatgacgccaagacttcaaccatgggattttgctggcggattggttattttatatgaagtaaatggacaagcttcaaatttactaggagaaccattaacaattagtggtccaaattcaatcttagttggaaatcgtggtctccatcaagaaattagcaatgattatttagagccacatcgcgatgcgttaatacaattacatgaacaacgatttaaaagaaaatcaaaataattaccaaaagcgtaatatgtagtcctaacaattaggtaacatattacgcttttatatcttaaataataaaaacacgcgccaatataaaaccatttaaatattcatcatgaacatgtgtggtctttaatcaacgcgtgttattgtcgatataacttatagccaatcgttttctcgatattttttctttgtagtaaatccaattccaaaggttgcaacgagtaatataaatgttaaaatcatcattggtacatttgatgcaccaacagcaaaactaaataatactaagaaaacaacagctaatatagaaaatacccaaaagatatttttagattttttttgtttcatcctatccccaccttttgcttatcttttctcaattatatgatataataaaaaagttgtaattaaaagtgggattttacttaagaaagaaggaaactatttatatgactaataaaagagaagatgtccgcaatatagcaattattgctcacgttgaccatggtaaaacaactttagtagatgagttgttaaaacaatctggtatattcagagaaaatgaacatgtcgatgaacgtgcaatggactctaacgatatcgaaagagagcgtggaattacgattctagccaaaaatacggctgttgattataaaggtacacgtatcaatattttggatacaccaggacatgcagactttggtggagaagtagaacgtattatgaaaatggttgatggggttgtcttagtagtagatgcgtatgaaggtacaatgcctcaaacacgttttgtacttaaaaaagcgctagaacaaaacctaaaacctgttgttgttgttaataaaatcgataaaccatcagcacgtccagagggtgttgtagatgaagttttagatttgtttattgaattagaagcaaacgatgaacaattagaattccctgttgtttatgcttcagcagtaaatggtacagctagcttagatcctgataaacaagatgataatttacaatcattatatgaaacaattattgattatgtaccagctccaattaataacagtgatgagccattacaattccaagtagcattgttggactacaatgattatgttggacgtattggtattggtcgtgtattcagaggtaaaatgcgtgtcggagataatgtatcactaattaaattagacggtacagtgaaaaacttccgtgtaactaaaatctttggttactttggattaaaacgtttagaaattgaagaagcacaagctggagatttaattgctgtttcaggtatggaagacattaacgttggtgaaactgtaacaccacatgaccatcaagaagcattgccagtactacgtattgatgagcctactcttgaaatgacatttaaagttaacaattcaccatttgctggccgtgaaggtgactttgtaacagcgcgtcaaattcaagaacgtttaaatcaacaattagaaacagatgtatctttgaaagtttctaacacagattctccagatacatgggtagttgctggtcgaggtgaattgcatttatcaatccttattgaaaatatgcgtcgtgaaggttatgaattacaagtttcaaaaccacaagtaattattaaagaaattgatggtgtaatgtgtgaaccatttgaacgtgtgcaatgtgaagtgccacaagaaaatgcaggtgcggttattgaatcattaggtgcacgtaaaggtgaaatggttgatatgactacaactgataatggacttacacgtttaatctttaatgtaccggctcgtggtatgattggttatacgactgaatttatgtcaatgacaagaggttacggtattattaaccatacatttgaagaatttagaccacgtattaaagcacaaattggcggccgtcgtaatggtgcattaatttcaatggatcaaggttctgcaagtacttatgccattttaggacttgaagatagaggtgtaaacttcatggaacctggtactgaagtttatgaaggtatgattgttggtgaacataatcgtgaaaatgatttaactgttaacatcactaaaacaaaacatcaaactaacgtacgttctgcaacgaaagaccaaacacaaacaatgaatagaccgcgtattctaacattggaagaagcattacaattcattaatgatgatgaacttgttgaggttacaccagaaagcatacgtttaagaaagaaaattttaaacaaaaatgttcgtgaaaaagaagcaaagcgtatcaaacaaatgatgcaagaaaacgaataatttaacataataaaagagaagctgagcgatgaaagttgcttagcttctcttttagcatataatatttgaaaaagtgtttaaatgctatcagttcctgttactttcacattttcaaatttctaacttgtttattcagatattaatcgagcggatagtgttgcgcacgttgtttaggggtgtctaatcgacttttacaatcatcgcacataaatgttcgaataggattgtttttaagtcgtttagactcagttgtgcgctcatctataaatacttttgcatcacagataatgcattgcacttgtctcaaattaaatcacctcaatatgagttacatggttgattcgatatgaataaccatcttcttgattgtaaataaaactatctacaccattatcgctgtaaagtcgtttaccgtcttttgcaaattggaaaaataaatagggtaatagatctatcggtatatctaaataatcatgctcatttgataatctaatagtagttgcagagtcatgtggttcggaatgtttgaaaaatggtgtcatattaatgacaaatgaaccttctaacatggcacgttttttgtattttatttctgaatttaaagtaggcggattagtttgtccttctaggatagcacgattccattcatgattatcttcaaagtcgattggttttgaaccatcaaatacacctttttctaaatcttcgatgctaacttttctatcatcgaaaatccaagtcgtactatctaatgttataggaaactttacggctcctttaatttgtatcattttcccactccctatcaatgtatatagcattattttaacacaaattgctaacgacacattttaaatctacttgctttttaatatttagtaagataaacttttagtaagacttgagaatttatatagagggggagcgtgtcatggcgaaacaaacaacaatgaaaaatgcagctttgaaacaattgactaaagatgctgatgaaatcttgcatctgattaaagttcaactagataatttaacattaccttcatgcccattatatgaagaggtactagatacacaaatgtttggacttcaaaaagaagttgattttgctgttaaattaggtttagttgaccgcgaagatggcaaacaaattatgttacgtcttgagaaagaactttcaaaattacatgaagcttttacacttgtttaaggtttaatatataagcatattaaaacggcgtgagatatcgacaattgagctgcgccgattttatatttatagtttaattactgattaaagtggctgttatgttgtcttcttgatgacatgtcagtcacttttattgggttttagcaattcacgatattaagtaaacaaatattctataaattacctcaagatacctgttaatatttgtgattatgacgatgtcatgtatataataagtaacatggatttttaaaattaaagtataaaacgaaatcatttgaagtataaattgtagaattggatgactgaatatatgaagaattttagaagtattttacggtatattggtaaaacctcaaagtttattgattatccgttattagttacatatattgtattgagtttaattggattagtgatggtatatagtgccagtatggttccagcaactaaaggtacattgactggtggtatcgatgttccaggaacgtatttttacaaccgacaattagcatatgtcataatgagttttataattgtattttttattgcatttttaatgaatgttaaattactgagtaatattaaagtgcaaaaaggtatgattataactatcgtctcgctattattactgacgttagtaatcggtaaagatattaatggttctaaaagttggataaacttagggtttatgaacttacaagcatctgagttattaaaaatcgcaatcatattatatatcccatttatgatcagtaaaaaaatgcctagagtattaagtaaaccaaaattaattttaagtcctattgtattagcattaggttgtacgtttttagttttcttacaaaaggacgtagggcaaacattactaatattaattattttagttgcgattattttttattcaggaattggggtaaacaaagtcctaagatttggtataccagcagtgctaggattcttagtagtatttatcattgcattaatggctggttggttaccaagttatttaactgccagatttagtacgctaacagatccattccaattcgaatcaggaactggataccatatttccaattcattgcttgcgataggtaacggtggcgtatttggaaaaggattaggaaatagtgcaatgaaattgggctatttaccagaaccacatacagattttatttttgcaattatttgcgaagaattaggtttaatcggaggattgctagttattactttagagttctttattgtatatcgtgccttccagtttgcaaataaaacatcatcatatttttataaacttgtgtgtgttgggattgccacatactttggaagccaaacgtttgtaaacattggcggtatttcggcaacaattccattaactggtgtgccattaccatttatcagctttggtggatcatcaatgattagtttaagtattgctatgggattacttctgattgtaggtaaacaaatcaaagtagaccagcaacgaaagaaacaacagcaaaaagttgatataagaagacaatttaattaaaaaaatactagccaatatttagtacgagatgacttctgtcattaagcgatacaaaacattggctatttatatactctttgtcaaattagattgatgagttcaataacggaagttaggcaaccaaacaacgcttaacttcctttttgttttgatattacgagattactcatgattatcaaattttataaacaaaacaacgtataattataactaaattttatgactaaaaatcactaaatgtggtggcgaaattagaatcatgatgataagataaagttatcgctattgataataaatgttgatgttttacaattttatttttaattttttagagttgtagaaatcgaaaatgtttcacaacaaaaacgtgaactacctgttgttgcataatcatttttgaaattattatttttgaagcggaggttttaattgtctcaagaatgttaaattttgaaaatttgaaacataactatagcaaaacagagcgctttaagataaaattttattatctaattagttagaaaattctaatagtttgaggagtgtatcgctattgaaacaaataaaaaagttacttgttgctaaccgtggagaaattgcaattcgtatattcagagcggcagcagaattagacatcagcacagttgcaatttattcgaatgaagacaaaagttcattacatagatataaagcagatgaatcctatttagttggaagtgatttaggtcctgctgaaagttatttaaatattgagcgtatcattgatgtagcaaaacaagcgaatgtggatgcgattcatcctggctatggatttttaagtgaaaatgaacaatttgcgcgtcgttgtgcagaagaagggattaaatttattggtcctcatttagaacatttagatatgtttggagataaagttaaagctcgtacaacggctatcaaggcagatttaccagttattcctggtacagacggtccaattaaatcatatgaattagcaaaagaatttgcagaagaagctggtttcccgctaatgattaaagccacaagtggcggcggcggtaaaggtatgagaattgttcgtgaagaaagtgaattagaagatgctttccatagagcaaaatcagaagcagaaaaatcatttggtaatagtgaagtttacatagaaagatacattgataatccaaagcatattgaagtacaagtcataggtgacgaacatggaaatatcgtacacttatttgaacgtgattgttcagtacaacgtcgtcatcaaaaagttgtagaagttgcaccatcagttggattatcaccaacattacgtcaacgtatttgtgatgctgcaattcaattgatggaaaatattaaatatgtcaatgcaggtactgttgagtttctagtatctggtgacgaattcttctttatagaagttaaccctcgtgtacaagtagagcatacaattacagagatggtaacaggaattgatattgttaagacacaaattttagttgcagcaggtgccgatttatttggtgaagagattaatatgccgcaacaaaaagatattacaacattgggctatgccatccaatgtcgtattacaacagaagatccgttaaatgatttcatgccggatactggaacaatcattgcttatcgttcaagcggtggctttggtgtacgtcttgatgctggagatggtttccaaggtgctgagatatcaccttactatgattcattactcgtaaaattatctacacacgcgatatcatttaaacaagcagaagaaaaaatggtacgttcattacgagaaatgcgtattcgtggtgttaaaactaatattccattcttaattaatgtaatgaagaataaaaagttcacaagtggtgattacacaactaaatttattgaagaaacaccagaacttttcgacattcagccgtctctagatagaggtactaaaacattagaatatataggtaatgtaacaattaatggtttcccaaatgttgagaaacgtccgaaaccagactatgaattagcatcaattccaactgtatcttcaagtaaaatcgcttcatttagtggtacgaaacaattgcttgatgaagtaggtccaaaaggtgtagctgaatgggttaaaaagcaggatgatgtcttactaacagatacaacctttagagatgcacaccaatcattattagctacacgagttagaactaaggatatgattaatatcgcatccaaaacagcggacgtatttaaagacggtttctcactagaaatgtggggcggtgctacatttgatgtggcatataatttcttgaaggaaaacccatgggaacgacttgaacgtctacgtaaagctattccaaatgtattattccaaatgttgttacgtgcttcaaacgcagttggttataaaaactatcctgataatgttattcataaattcgtacaagaaagtgctaaagcaggcatagatgtctttagaattttcgattcattaaactgggtagatcaaatgaaagttgccaatgaagcagtacaagaagcgggcaaaatctcagaaggtactatttgttatacaggtgacattttaaatcctgagcgatcaaacatttatactttagagtattatgtcaaactagctaaagagttagaacgtgaaggtttccatattttagcgattaaagatatggcaggattattaaaacctaaagctgcttacgaattgattggtgagttaaaaacagctgtagatttaccaatccatcttcacactcatgatacaagtggtaatggtttattaacgtacaaacaagcaatagatgctggtgtcgatatcattgatactgctgttgcttcaatgagtggtttaacaagtcagccaagcgccaattcgttatattatgcattaaatggcttcccacgtcaccttagaactgatattgaaggtatggagtcacttagtcattattggtcaactgtacgtacttattattcagactttgaaagtgatatcaaatcaccgaatactgaaatttatcaacatgaaatgcctggtggacagtattcgaatttaagtcaacaagctaaaagtttaggtttaggcgaaagatttgatgaagtcaaagatatgtatcgcagagtgaatttcttatttggtgatatcgtaaaagtaacgccatcgtctaaagtagttggtgatatggcactttatatggtacaaaatgatcttgatgaacaatccgtgattacagatggctataaattagatttcccagaatcagtagtgtcgttcttcaaaggtgaaataggacaacctgtaaatggttttaataaagatttacaagcggttattttaaaaggccaagaagcactaacagctcgtccaggtgaatatctagagccggttgattttgaaaaagtccgtgagttgcttgaagaagagcaacaaggtcctgttacggagcaagatattattagttatgtattatatccaaaagtatatgaacaatatattcaaactagaaatcaatacggaaacttatcgttacttgatacgcctacattcttctttggaatgcgtaatggtgaaacagtagaaatcgaaatcgataaaggtaaacgattaattattaaactagaaacgattagtgaaccagatgaaaatggtaatagaacgatttactatgcgatgaatggtcaagcgagacgtatttacattaaagatgaaaatgtgcatacaaatgcgaacgttaagccaaaagcagataagagtaatccaagtcatatcggtgcgcaaatgccaggttcagtaactgaagtcaaggttagtgtaggtgaaactgtgaaagctaatcagccgttgctaattactgaagctatgaaaatggaaacaacaattcaagcaccatttgacggtgtgattaaacaagtaactgtaaataatggtgacacaatagcgacaggcgatttattaatcgaaattgaaaaagcaactgactaaaatgattaaaataaaacgagattacacaacaattgacgtgtaatctcgtttttacttgacttaggtttaattttaaatattgatataaaaaaccgtaattttaatgggcgtgccattaaaattacggtttgcttttttgttattgcttgtcacttcttactgatcgtaacattagcatgataaagtatgttgtcataccaaataaataagtgataaataatgcatggaatagtgcgattatcaagttaacatttgtcataatagacaatgcacctgtgataacttgtaatataacaagtataaatgcagctgtataaccataatgaacagtacggttatttggataatttttaacagcgtgaatataagtaatcataataatcgtaaacactataaaagccatgatacgatgcgtgagttggacccaatcttgttctgaatgtggtacaagatcgtggaatggcaatggccaaccaccatatgctaaacttgcatccgcatgtctcactagtgcaccagtgtaaacaccacaataaatgatgattgccattaaccatgttaaacgtcttaatggctttttgatatataattcgtcagcttcatatttttgatctatagagaaaataattaatgttattaaaaatacagatgagaaactgattaatgatataccaaagtgcaatgctaaaacgtaatcgttttgttgccaaataacagcagcagctccgattaatgcttgcaataataagaatccaacactaatgattgataaaggtttaatttctttaatatagcctatatgtttccatgcagtgataactaaccataagaccattaataaagacaaagctgaaacggctctatgacttaactcaataatcgtatcaataggaaagaattctggaatcaacgcaccatgacatagtggccaagaagaaccacaaccatcagctgatccggttttggtaactaaggctccaccaagttgtacaaatgtcatcattaacgttgctacgacacctaaccattttaaattctttttgccaaacaatttatacaccccatcataaaaaaacgcatcactgagaattagaattaatagccggatttgagatgatactataaattgacctgattgtaggatatgaaaagatgggatccaacgcaggaaatatgatttaattttacaagtattgtaagtggacgacataaaaagaccttaatcgtaatgatttatttattgggataattatgtaatccacgtttactcaaatttgaagcttaaatattaatctcttttagatgcatgattctacttattaaaattttctaacatatacattatagcaataaattaaatgttatttgtgtcacaaaattgacattttctcttgtcgttaatttgtcacaatttaattttattaaacctagtctttttatgcaatctaagatatcataatcttatatgaacaaatttaaggagggggattatgagcaaagagcatactttgtcacaaaatattagcagagttaacttcaaagaattgcaacagataattaaaatgggacttgttcaaggtaacttaattccggcttttgcgggcgcatggctagcagttgtaatgacaaatcattccttcttatcatcaatacctcaaattttattaatgctatttggatctactttaattatgggtggcgcatgtgcgttaaataattattacgaccaagatattgatcgtattatgcctagtaaacaaaatagaccaactgtaaataatagaattacagatcaaaatttattactattaagttttggtatgatgttagttggagaaatttgtttgtttttattgaatataccatcaggcgtacttggtcttatggggattgtaggttatgtgtcttattactcaatatggtctaaaagacatacaacatggaacacagtgattgggagttttcctggagcagtaccaccactaattggatgggttgcaattgaaggacaaattagtttaacagcgattgcgctgtttttagttgtattttgttggcaaccaattcatttttatgccttagctattaaacgtaaagatgaatatgcacttgcaaatattccaatgttaccatcagttaagggctttaaacgtacacgtgtcagtatgtttatctggttgattattttattgccagtacctttattactaataaatttaggtgtcgtattcgtagtgttagctacattattaaatttaggatggattgcattaggtttaacaacatttaagaaaaattcagatcaaacaaaatgggcaacacaaatgtttatatattcactaaattatttagtgatctttttcgtgttagctgtgattgtttcattacttactttgatctagattaattaagttaggatgaaaaatatgggcgttccaattttaccaacgattagtacgacatgtattgtcattagtgcaattttaattgccattggttggagacttatttggaaaagggaaataaataaacacaaaaatgttatgttagctgcagctgtttttgctttaacttttttcttaatctatgcaagtagaacgatttttatcggtaatacagcatttggcggaccagcatcaattaagaaatattatacgattttcttatttttccacattaatttagcaacaattggtggtattctaggtctagttcaaattattactgcatttaaagataaatataatgtacaccgcaaattcgggccattcgcttcagttatatggttctgtactgcaattacaggtgtagcagtttacttattattatatgtattatatccaggtggagaaacaacatcactgattaaagcaacatttggtcattaattcgcttatacaaatgatactaatctgataaggcaatttgttttatcaggttttttgatgaaaaatagtcgggcagttgatggtattcatttgataccttaactgtccatttttttatacatattttaatcctaataatgaaattcaacctgaaaacataaagataggttatgatatagagtgtagggaaaatctttatgatgttaacattatgcctgaagatgattttgtttcatcgaaatgacacagtcagtgttgaaaatttgctaattaatgtgttgttttttacaatagtattaatactttttaggtggttgattgatgaaaaagttaattataagagtcgtcggtgtattatttttagttggatttttaatatatcttttttattcaccgagattaaaatttgatgtattagagaacccgaataaaggtaataaagtaaatagatctgaacaggtgaataaatcaaataaccatgctgaaaatccaaagcctaaagaaggtgttggtacatgggtaggtaaagatattaaagtgcttacttctaaatttggacaagcagatcgtgtctatccttttagagatggttacaaaaattatgtgtttaaagacaaaaacagttattacattgtttcaactaaacgtgaagaaatcgtttcagtgtatgctacaggtgaaaaagtaaatgttagtccgttaaaaataggacaacattctgcagaaatttttaatcatacaagtattaatccagaaccgtcctttaaagttgatggtaaaaaatatgaatttgaactttcagatgaagatttaaaaacacaaacactgattaaatatggcaacatatatgcacaagtgtattctgatcaacaatcgaaaaaggtgctaagtgtacgatttttaacaaaagaaatgttagcagatattgaaccttatcgattaaattctaattctacgtcagaagagcataataagcgtccagttgagcaaaatccaaatcaattaatttctctttatgaagtaacgaatgaaatgagaaaattaaaaggattaaaaccattgaaaatcaatagcgatttagcacatattgcatctaataacttatatgaagcgacctctaatggttctgatagtgttgaatttacagaggacgcattaagagggcaattagataaagatcacgttacttataaaacaactgctcaaaatgttggttatgcgtttaatgatgtaccaacattaatccatagttggatgaattcagatatacatcgatctcgtctattaaattcaaaatacgatgagatgggtggagatgtaatgagagattattattcactaattttcttagaaaaataacaatgaggggtatttatgattaatgaagcttcactagcgatattagatgatattgatgaactagctgatatgatagttgcatcagatatttatgcatcatttgagcaagctaagcaggcgctcgaaaacaatgacgaggcacatttactttatcaatcatttttaaaatcaaaagagaaatatgatgaagtaatgcgtttcgggaaatatcatcctgattataaaaaagtcatgttagagacaagacaacgcaaaagagcatatgagatgcttgacgttgtgatgcattacaaagctagggaaatggcacttcaacatttaattgatgaagttgttacgaaaattgcgtacgctgtttcagaacatgtcaaaatagaaacaggtaatccattctttcaaacatcacatagtggttgtgcgacgggcggatcctgtaattgttcattataaaaaacatcgagtcagaaaaagatggttattgaaaccattaactagcatctgactcgatgtttttgtttattgtttattgtttattgtttattgtttattgtttattgtttattgtttattgtttattgtttattgtttgtttgaattgttgtgctaaatctggtcgatcagtcactatagtatgtgcacctttttggtataaatcattcatcagatttatactatttacgccataatagcctggaatgacattcatatcatttaaccatttgataaaacgagatgaagtcaaattaatacctttaaaatgagtaggcatttggaacgtttgtgctaatggttggtagtacctaccacctaataaatgatattttaaaaatgcctctgtaacttcctgttggctagcaccaattgcaacggatccttgtgcaattttattaaaacgtacgatttgttctttataaaaacttgtcacaagaacacggtcaaatgcttgattctctgcaattgtatcaaacataatttgtggtgcgattgagccttcataggattcaggagcatcttttaagtctacgtttatatacatatcaggatattgcttcagcaactcatcgaaggttagtatagctgtgtgtgcatgaccacgatatggtgttagtccattgatatctttgaagtgataacctgcgtctaatttttttaattctgctaatgtatgggcactaacttttccagagccgttcgtcgttctatcgactgttgcgtcatgaaaaacgataagctgttgatcttttgtgagtctcacatctgtttcaaaaccatcaacacctaattgtttagcatagtcaaatgcaagttgcgtttgctctggtcttaaagccataccaccgcgatgcgcaaatatatatggtgcattgcctttgaaaaaaacagggatggtttgctttttagtaatcactttatttttatttatcattaacaaactacttacaaatccagcaccgactagtaccgcatttaaaatgtttctgtttacttttttcataaaaaattcctcctcgtttacttttatagcttaacaaattcatagttctgactacagcaaaatgtgcggttaatcatatagtgttgttcttgagcattgaattaatataatgatgcttaatataatctaaatacatttatcgtgtaattacataagacataattaaggtagcttaatattttaaaattaataaagacatgatatgattaatgctgaaaataaatggagtgaggtttaaatgaatttaatcccaagaactagtattgtagtttatttaaaacatatgaaacatgaacgacaaatccgaaaatatggacatatcgttcattcaaatagagatcgtaaatttgtaattatgtatgtgaatgagcaagatgttgatcaaattgtacataaactaatgcaacttaaatacgttagacacattgatggctcaccatataaatacttaaagaaaacatacgaaaaagagaaacacgaaatatataattaatattattgaagttctggtatccatttttggagccttaacacactaattaaataattataatataacgataaatcatgaaatgcttgagggggctgtacatcgatacctaaaataggtatgtcgaatttttcagcacaatcattaatcatttgaaactttttatttgaatctggatatggatatttaatagcgttaatcatgatataaaatgcttggaaatgattgccagttgtagggttcataatgattgctacagatgactttttattttcagcttgtggtgaatgaaaatagataattttatcaatacgttgatggttatattcaatcatcgtcatgaattcgaacaaatctgttagaccttcaccaagtgtaataaatgtttgtttcattggtttatcattctcctttttctcaataaattatattaaataactaaatgaattggaagtgtgaacaacatgcgcgtcattgcaggtaaacataaaagtaaagctttagaaagtatggaaggccgtaatacgagaccaactatggataaagttaaagaaggtatctttaatagtttatatgatgtgtcaggtataggtttagatttatttgcaggaagcggggcgcttggaatagaagcactctctcgaggtatggataaggttatctttgttgaccaaaattttaaagctgtaaaagttattaaatcaaatattgcgaatttggatttagaggcacaatctgaagtttataaaaataatgcagatagagctttaaaagcattgtcaaaacgtgatattcaatttgatgtcattttcttagacccaccttataataaaggtctcattgataaagctttaaaactaatttcagagtttaatttattgaaagaaaatggtatcatcgtttgtgaatttagcaatcatgaagaaatagactatcaaccgtttaatatgattaaacgttaccattatgggttgacagacacattgttattagaaaagggagaatagcatggaacatacaatagcggtcattccgggtagttttgaccccattacttatggtcatttagatattattgagagaagtacagatagatttgatgaaattcatgtctgtgttctcaaaaatagtaaaaaagaaggtacgtttagtttagaagagcgtatggatttaatcgaacaatctgttaaacatttacctaatgtcaaggttcatcaatttagtggtttactagtcgattattgtgaacaagtaggagctaaaacaatcatacgtggtttaagagcagtcagtgattttgaatatgaattacgcttaacttcaatgaataaaaagttgaacaatgaaattgaaacgttatatatgatgtctagtactaattattcatttataagttcaagtattgttaaagaagttgcagcttatcgagcagatatttctgaattcgttccaccttatgttgaaaaggcattgaagaagaaatttaagtaataaaaataacagtattttaggtttatcatggtttacaatcctaaaatactgttttcatttgttaacgatattgctgtatgacaggtgtgttgaaatctgtttgttgtttcccgcttattgcattgtatatgtgtgttgctttgatttcatttgtgaagtaatgtgcattgcttttgttaatattggttatatattgtctttttgggaacgctgtttttaaatgctttaaatattgtctgccacggtcgttcatcgctaatactttaactgcgtgaatgtttctcgtaacatctgtaggtttaatgtttaataatacattcattaacagtctctgaatatgcgtatatgtataacgctttgtttttagtgattttacaaaatgatgaaaatcagttgcttcattaatgttagattttaaacgattttcaaaaccttcagtaacagtataaatattctttaatgacgctgtagtcatagctatgatttgatatttcaaatatgggaatatttgatttaatgttatatgaggtgttacgtacaggtgttgaatatctttaggtaccacatgatgccaatgatcatcttgactaatgattgatgttctaatagatgtaccacttgcaaactgatggtgttgaattaatgaatcatgatgttgagcattttctcgtttaatagaaattgcattgatgtttttagcatgtttagcaattgctttcagataactaataccaagtatgttgttaggacttgctagtgcttcatgatgctctaataattcgctaatgatacgagggtagcttttaccttcttttactttttgtgaaaaggattcggattgttcaatttcattaatgctgtgagctaattgctttaatgttttgatatcattattttcactaccaaatgcaattgtatcgacactcatatagtctgcgactttaactgctagttcggcaaaatgatcgccagatgataaactggcagttgctggtagttcgataactaaatcagctgttgataatgccatttttgcacgagtaaacttattatagattgctggttcgccacgcatgacaaagttaccactcattattgcaatagtaacgtcagcatttgtaagttttttagattgattaatatgatattgatgcccattatgaaagggattatattctgtgattaagccaacgcttttcatttgtaattcgtcctttcggtattcattattaatattgtaacagaacatgatatgttaagaaaaaatcttgacaacttgttcttagaaagttaaaataaattttgtgcttgttagaggtgaagccatatgaaatggtcaattacgcaattaaggaaatatcaaggtaagccatttgaatttgatcaaacggtgagttttgacaatttaaaagaatcattagatttaattgatttatctccaattacaatccaaggtcagttaaccattaagtcaacagaagtcgttgcggatattcacattactggtacgtatacaatgccttgtgcacgtactcttgtaccagttaaagtcccactagatgtaactactacagaagtatttgatttagaagggtacaatcagtataacgatgatcaagatgatgtagatgaacactatcacattattaaagatggtatggttaatcttcatgatattgtcgaggatatagttattattgagaaaccaatgagagcttattcagagcaaagtgaccaaatgttgacagtaggtaatggttgggaagtaatcgatgaggatcaattagatgagcttgctaaacagcaagaacaagatgattcagaatcacgacaagttgatccaaggcttcaaaaattacaacaattatatgataaagagcaataagtagtttaattaatgatataatgttgttaattaaactaacatttagtatttttcgtttataatctaaggaggatatatcatggcagtaccaaaaagaagaacttctaaaactagaaaaaacaaacgtcgtacgcatttcaaaatttcagtaccaggtatgactgaatgcccaaactgtggcgaatacaaattatcacaccgtgtatgtaaaaactgtggttcttacaatggcgaagaagtagcagctaaataattttagttactcaatataaaaagtcccgcttaaaatgattgttttaagtgggactttttatattgcaaaaaataaatggcggacgaggtaacaggatagttattccgaacttccaattaataaaactctatacctgtaatcctcaatgagttctggcgcttccctttaattcctcttacatattcaaaatgaatatttttgattgccatctttatgaattcggttttcaactcatcttccattaattcccaaccgtttagcaatgaatacttgaaatttttaatcttctcataatcaaaacttttacttttattatcactcttacgattttcatagtcacgtatttcttggtcaatacgacttattattggaaaggcttcatctttattcatcataccctctataaaaagtgtttgacatctagcgcgttcttttctcaacttttcaatatcgatgccgacatcttcagtttctttaggttggtttttggttttatatgatgtcaaatcaaattgttttagataattgtaaaattgtttcaagacctcgcgttcgtctatgttacatgcatttttgtttttggtatttttacaattaacacaaaagtataatttagaataccaaacttctttatttttaggtgtatgcttgactgtgtttaaagttaatttttggttacagttaggacataatagtttgcttctgaaaatggcattatgttttacgattgtagagttagttttttcacttatcctttgttttatttctttatactcttcttcacttataatagcctcgtgggtattttcgacgaatatatcaccgaaaacaagatgacctctagctaccggacttataagagcactacgtataactgatctgtgccagtttttacctaagggtgctttgtatttagagttgttcaacttcatagttatttctcttaaactagtaccttttttcgcttcttctactgcaaatcgtaatacctttttatattcattaggtacaaatttatcatttactctgtcgtaatagaaaggggggacggttttagctaatccttttctagccgatgcacgtctacccattgcagtacgctcttgaattgttgtacgctcccactctgccatagcacctactaatgttacgaacaaacgtcccatagcagaagttgtgtcatatacttctgttgcgctcctaaacgacacgtttttattctcaaacaattctagtatctctagtaagtctttaacacttcgagttaatcgatctagtttatagactaagatcaaatcaaaattatctatttcattcaacatttcttgtaaagcgggtctgtcttttttagctccggagtatcctgcgtcagtatatactttatgaatcttccagtcgtttatgtcgctgtaagctcttaattttctttcttgttcttcaatagagtgtcctttttctttttgttcaagtgtacttactctagtataaattgctactttcatgtgctccctcctcaaaattggcaaaaaataataagggtaggcgggctaccctctatataaataagttaacaatcaatcctactgctcctactatcagactcaaaccaccaatagctgtacttatagctattcctacaaaccattttgtctgtctagcttctaaaccgcttattttagcatccattttatcagccattctgtcaggcaaagagtctaacttattgtctatacgtttttcaaactgttcaaatacttctcttgtaatatatttttcattcatattaccacctccggagttatttccttttggttttattttatcatgtttattgtcagggagtaattggtacaaagttttatcgcctgatatgggtttcaattcactcattttattgcccctttactctaggtatcattgatactttagtataaaataagtcatgtttattattatgtttcattaaatttagaagttcttttgaattgatgttttgaaaatctatctgataatcagtatatatgattttaagattttgataatttttactgaaatcataatttcttaaaccatgcgcaaaagataaatcagttaattttaatgaataatcaatgtattttaatgaagtgttactgatggcgtcttgccaaacttcattaatttgatattcgggtacagacgaaagtccgtaaggtggttgaactttatcataatataaaatagtgatatacatgtttttatgtgtagatatttcatttatcccgcttaaagtaaagtcaaagtataatgggttattgaactccagatcgctaaaatcttttatggcttttttattttcttgttcgtctttgatatagaatgatatattacttatcattggtcttatattttccatccctcatcctcctcgcgccacacaggcgctgttaatcacattttagttctatcagtgattttagactccataactctttgacgtgactctttagcttctcgaatcatatctttaaattcttgactgtctataaaagctttggcttcttctatttgttcttgagtaagctctttgccaccagtattgatgtgtaagtgttcaatttctttataagaactcattttttcgactcctgttcttcaagttcacttttagttataggtaaaccattattcaacctataaagtcagttcttcttctgtataaaaggggatttcaaccatttcccactcttcaatgttaatgtcaacttctttaaattcattttactacctcctataaaataacttttccaactaatctcacactttcattatcataaaaatgtaaatctttatactttttatttaaagaaaccaacgttaatctgttatcttctacataaaccttctttacgtaagcatctccatttataataaagacgcctatttgtccatctttgatagtgtgagatttttcaatgaatataatttgtccatttttaaataacggctccattgagtctccatttacttttaaagctatatcatgtgcggggacataacctcttacgaattcttttgaaataggttcgttatataatctttcaccaataccagcagacgcacaaccatatatatccacttcggatttttcttgaatgtaagaattgaaatctaccagattatcatcactgtcattattttgctcttctaattgattagtcgcatattttagtacattgctttgtcttggaggcgtgagttgagatgacacgttatgaatttcttcaataattttcgaatcatccatatcatgtattaaatctaagggtttaactccaaaaacgttagctatttcaggtaatttatctagttttggacttctaattccctttctccatcttgtgactgttgttctatttacatctactaattctgctaattcactatcactcatatctcttttgttcatcagacgttctagattcgaagaaaatgaactcatatttttatctcctttaaacatattatctaactaataacttcattatatgcctacagttccaaaaatgcaacaaaaaacataaaaatatgtgtagaggcaaaaaaatatgtaaaaagcacttgcaattttggaacatcaggtgtagtattgttttcaggaggtgttccaaaaatgcacaaagatttatatagctttagaaaagcggcgaaaaagaaccaagactttatggggagtttgattggtgtttcgggtcaacaatacggaaaaagagaacgcggagagatttctattaatttagatgaagcgatgattttttctaaggcactcgaaacacctatacaagaactatttccagaatatttttttattgagcgagttccgaaaatgcacaaaaacgaaataacatcttaaaaggaggacacaatggaacaaatcacgttaaccaaagaagagttgaaagaaattatagcgaaagaagttagaaatgctataaaaggcgagaaaccaatcagctcaggtgcaattttcagtaaagtaagaatcaataatgacgatttagaagaaatcaataaaaaactcaatttcgcaaaagatttgtcactaggaagattgaggaagcttaatcatccgattccactaaaaaagtatcagcatggcttcgaatcaattcatcaaaaagcttatgtacaagatgttcatgaccatattagaaaattaacattatcaatttttggagtgacacttaattcagacttgagtgaaagtgaatacaacctagcagcaaaagtttatcgagaaatcaaaaactattatttatacatctatgaaaagagagtttcagaattaactatcgatgatttcgaataaaggaggaacaacaaatgttacaaaaatttagaattgcgaaagaaaaaaataaattaaaactcaaattactcaagcatgctagttactgtttagaaagaaacaacaaccctgaactgttgcgagcagttgcagagttgttgaaaaaggttagctaaattcaacggtaaggatttgccctgcctccacacttagagtttgagatccaacaaacacataagttttagtagggtctagaaaaaatgtttcgatttcctcttttgtaacagtttcaattccttcatatcctggaaaaacaattttctttaaatccgaaacatgtttttttgaaccatcctttaaagtaactagaagtttcatacttatcacctccttaggttgataacaacattatacacgaaaggagcataaacattatgcaagaattacaaacatttaattttgaagaattaccagtaaggacattagaggttgacggcgaaccatattttataggaaaagatgttgctgacattttaggttacgcaaacggacgagatgctttgtcaaaacatgttgatgcagaagataagctgacgtcgcaaatcgcgacggcaggtcaaaacagaaatgtaacgatcatcaacgaatcaggattatacagtttaatcttttctagcaaattagaaaatgcgaaacgatttaaacgctgggtaacttcggaagttttaccaacgttaagaaaaactggtgcttaccaagtacctagcgacccaatgcaagcattgagattaatgtttgaagctacagaacaaacaaaacaagaaattaaaaacgtaaaagatgatgttatcgatttgaaagaaaatcaaaaactggatgcgggagattacaatttcttaactagaactatcaatcaaagagtagctcacatacaaaggctacatgcgataacaaatcaaaaacaacgtagcgaattattcagggatattaattcagaagttaaaaagatgactggtgcgagttcaagaacgaatgtaagacaaaaacatttcgacgatgtaattgaaatgattgctaattggttcccgtcacaagctactttatacagaattaagcaaattgaaatgaaattcgaaaacgaaatataggaggaattaaaaatgaacacactatacaaaacaaccctcctcaccacaatggcagttgtgacgtggaaggttgtaaagattgagaaaaacacaagatttaaacttagaaattttgattatccaaaaattagtaatgctcagagcaaatcattgttggatattgctagtcgctatctaaaagatatttaactgtattcaaaattttcatatcttgttgagcttttaagctttcgtataaagctattgaataaataatttcgtaagatacgttttcaggagcatcttctttcaacttatttattctatctctaaaaaagtcactgtcaccaccgaattctttttcggcttgattactaagttcaccaaagaaattttgaaaatcattaaattccatacttatccacctcctttcactaggagataactaaattatacacaacacaaaaataaaaaggaggaatagatatgataaaaaatagtttgcaagctaaagaacttgcggtaattttatctgtttctaaatccaaagcaggacaaataataagagaactgaataaagagcttgaagacgaaggatacattgcgatacgaggaaaaatacccgtccaattagctagaaaaaaattcccttatcacgacttatcagacgagagaataatggaggagttaaaaaaagaaaatgagtaaaacttataaaagctacttaatagcagtgctatgtttcacagtcttagcgattgtacttatgccgtttctatacttcactacagcgtggtcaattgcaggattcgcaagtatcgcaacattcatattctataaagaatacttttatgaggtggatgattaaatgacttggttcgaagaacacgttgaacctagtgtggaatgggaaagaaaagcagaacaagctgtgttaagtgatgatgaagttaagacgattactgaatacagagagaagtacaacaatccatatatttacatgtcggttcaaaacaaaaattatcttgctgaatatgtagacagacataccggtgacatagtattacacaatttaaaacttaagaaatcatacagaagaagagcgcatcaatatttttttgtcggccaaatagtagtaccaggcgagccaaaaggcataatttacgaaacatctttgataataagataaaaaaactgctacttgttggagcaagtaacagtatcaaacacttaagaaaaaaatcatgttcaatataaaacgaaaaacggaggaagtcaagatgtattacgaaataggtgaaatcatacgcaaaaatattcatattaacggattcgattttaagctaatcattttaaaaggtcagatgggcatatcaatacaagttaaagatatgaacaacgtaccaattaaacatgcttatgtcgtagatgaggacgacttaagtatggcatcagaattattcaaccaagcaatagatgaatggattgaagagaacacagacgaacaggacagactaattaacttagtcatgagatggtaggaggtcgctatgaatcagactgtaacttatatcatccgtcatagggatatgccaatttatataactaacaaaccaaccgataacaattcagatattagttactccacaaatagaaatagagctagggagtttaacggtatggaagaagcgagtatcaatatggattatcacaaagcaatcaagaaaacagtgacagaaactattgagtacgaggaggtagaacatgactgaacagacattatttgaacagttgaacagtaaaaacgtgaatgatcatacagaacaaaaaaatggattaacttatctagcatggtcatatgcacaccaagagctgaaaaagattgacccaaactacacagtaaaagtgcacgagtttccacatccagatattaacacagaaaattattttgtaccttatttgactacaccagagggctattttgtacaggtatctgtgactgtgaaagatagtacagagactgaatggcttccagtattggactttagaaacaaatcgcttgctaaaggtagtgcaacaacttttgatatcaacaaagcgcaaaaacgatgcttcgttaaagcttcggctttacacggtctaggcttatatatttacaacggcgaggaactaccaagtgcaagtgacaacgatattacagaattagaagagcgtatcaatcagttcgtgaacttatctcaagaaaaagggcgagatgcaactatcgataaaacgatgagatggctaaaaatatctaacattaataaattgagtcaaaaacaaatcgcagaagcacaccaaaaattagatgcgggattaaaacaattggatagtgaggagaaacaataatgttaaacagaacagtattagtaggacgattaacaaaagacccagaattaagaagcacgccaaatggcgtaaatgtagggacattcacattagcagtaaacagaacatttacgaatgctcaaggcgagcgtgaagcagactttataaacgtagtagtgttcaagaaacaagctgaaaatgttaaaaactacctttctaaagggtcgctggcaggtgtagacgggcgattacaaacacgcagttacgataacaaagacgggaaacgtgtatttgttacagaagtagtagcggacagtgttcaattcttagaaccgaagaataacaaccaacaaccaaacaacaattatcatcaacaaagacaaactcaaactggtaataatccgttcgacaataccgaagcagacttttctgacttaccgttctgattggaatgattagatgccaataattactagttatatcactcaagatgacggtacaacaacagttgtcatctcgggtgttgaattaggcaataaagaaacattactacttgataacgggtttgatgtggaagtcgatgtaagcgtcatagatccgtttcaaattactggacaacaacgtaagttaatattcgcattgtgtaacgatatagaagctcatacaggacaacctcgagattgtatgaggcaaatgttccaagattatgtgaagtttctgtatggctatgaagaacgcatatctttatcaaattgttctcgaactatagccaagcaaattatagaagcgatgtttgagtggatttttacaaatgcgattccattaaattataaaacaagcaaattgatgaaagaagataaaaattatctttattgggcaactgttacgcgtcattgcattatatgcggaaagcctcacgctgacctagcacattacgaagcagtaggtagaggtatgaacagaaacaagatgaatcactacgacaaacatgtattagcgttatgtcgcgaacatcataaccagcaacatgcgattggtgttaagtcatttgatgataaatatcaattgcatgactcgtggataaaagttgatgagaggctcaacaaaatgctgaaaggagagaaacatgaataagttactaatagatgactatccgatacaagtattaccgaaattagctgaattaatagggttaaacgaagcaatagtattacaacaaatacattattggttaaacaactcaaaacataagtacgatggtaaaacttggatattcaattcttatccagaatggcaaaagcaatttccgttttggtctttgattactataaaaagaacaatatacagtcttgaaaaacaaaacttgttgctcataggcaattataacaaagctaaatttgataagacgaagtggtacaccattaattatcaaactattgaaggtatgatacgaccatcgtatcaaaatgatacgacgagtgtatcaaaaagagacgatggagtgtatcaaaatgatacgaccaataccatagactacacagagactaacaaacatagagagacagacgacgtctcaaagtcatttaagtatattagtaccaatttagagattatacaaaaccctttaaaagcagaacagttagaacacgaaattaaatcatttaagcaagatcagttcgaaatagtaaaagttgctacagattactgtaaaggaaataacaaaggtctaaattatctattaactgtattaaagaactggaataaagaaggcgtttcagataaagaaagtgctgaaaacaaattgaaacctcgtaacactaaaaaagaaactactgatgatgtcatagcacaaatggaaaaagaattgagtgatggctaatgccgatgagcaaaacacaagcattagaaattattaaaaaagttaggtacgtatacaacattgattttgataaaccaaagttagaaatgtggattgatgtattaagtcaaaacggagattatcaaccaactgtaaaagcagtagatggatatatcaacagtaacaacccgtacccgcctaacttaccagcaatcatgcgtaaggcacctaaaaaagtatctatcgagccggtagataacgaaaccgccacacaccaatggaaaatgcagaacgaccccgaatatgtcagacaaagaaaaatagcgctagataacttcatgaataagttggcagaatttgggggcgataacgaatgaattatgggcaattcgaaattgaaagcacaataatcgctacgctacttaaacaaccggacgtactagaaaaaataagagttaaagattacatgtttacgaacgaaaagtttaaaacctttttcaattatgtaatggactctggaaagatagaccatcaagaaatctatttaaaagcaactaaagataaagagtttttagatgcagatactataactaaactttacaactccgatttcattgggtacggcttctttgaacgttaccaacaagaattattggaaagttatcaacttaacaaagcgaatgaattggtcactgagttcaaacaacaacctacgaaccaaaactttaacaacttgattgatgaactcaaggatttaaaaacaattactaacaaaaaagaagatggaaccaagaagtttgttgaggagtttgtcgaagagttatacagcgatagccctaagaagcaaattaagacgggttataagctcatggattacaaaatagggggattggagccgtcgcaattaatcgtcatcgcagcgcgtccctcagtgggtaagacaggttttgcattaaacatgatgctgaacatagcacaaaatggatacaaaacatctttctttagtctcgaaacaaccggcacatcggtattgaaacgtatgttatcaacaattactggtattgagttaacaaagataaaagaaatcaggaacttaacaccggatgacttaacgaagttaacgaatgcaatggatcaaattatgaagttaggtattgatatttctgataaaagtaatatcacaccgcaagatgtgcgagcacaagcaatgagacattcagacgggcaacaagttatttttatagattaccttcaactgatggatactgatgcgaaagttgatagacgtgtagcagtagaaaagatatcacgcgacttaaagataattgctaatgagacaggcgcaatcatcgtactactttcacaactgaatcgtggtgtcgagtctaggcaggataaacgtccaatgctatcagacatgaaagaatcaggcggaatagaagcagatgcgagtttagcaatgctactttaccgtgatgattattataaccgtgacgaagatgacagtatcactggcaaatctattgttgaatgtaacatagccaaaaacaaagacggtgaaaccggaataattgaatttgagtattacaagaagactcagaggtttttcacatgaatatcatgcaattcaaaagcttattgaaatcaatgtatgaagagacaaagcaaaatgacccgattgtagcaaatgtctatatagaaactggttgggcggtcaatagattgttagacaataatgcgttatcgcctttcgatgaatacgacaaagttgaaaagaaaattatgaatgaaatcaactggaagaaaacacacattaaggagtgttaaaaatgccgaaagaaaaatattacttataccgagaagatggcacggaagatatcaaagtcatcaagtataaagacaacgtaaatgaggtttattcgctcacaggagcccatttcagcgacgaaaagaaaattatgactgatagtgacctgaaacaattcaaaggcgctcacgggcttctatatgagcaagagctaggattacaagcaacgatatttgatatttagaggtggcacaatgagtaaatacaatgctaagaaagttgagtacaaaggaattgtatttgatagcaaagtagagtgtgaatattaccaatatttagaaagtaatatgaatggcactaattatgatcatatcgaaatacaaccgaaattcgaattattaccaaaactagataaacaacgaaagattgaatatattgcagactttgcgttatatctcgatgacaaactgattgaagttatcgacattaaaggtatgccaaccgaagtagcaaaacttaaagctaagatgttcagacacaaatacagaaacataaaactcaattggatatgtaaagcgcctaagtatacaggtaaaacatggattacgtacgaggaattaattaaagcaagacgagaacgcaaaagagaaatgaagtgatctaatgcaacaacaagcatatataaacgcaacgattgagatgagactacctaccgaagctgaatatctacatttcgatgatgaggataaagaataagaatcgctggcggattacccatatacccatccagacgaaatcctagaggctgacagtttaaaaattagtaatgtaaatgtgcaggtggaataaatggtgaacaccgccaggattgtagggatacgccaccgaccttgtaggttcagtgaatttgaaatggagttaattgaaagtcacggtataacacccgggatggtttctaaaagagtaaaagacggttgggaactacatgaagcaatggacgcagcagaaggcatgcgtttaagcgagtacagagaaaagaaaacaatagaaagactggaacaagctagactcgaacgcaaattggaaagacagcgaaagaaagaggctgagctaagaagaaagaagccacacttgtttaatgtaccacagaaacattcacgcgatccgtactggtttgataatacttataaccaaatgttcaagaagtggcaggaagtataaatgcctaaaatcgatagcgcatgtaaagaatacttaaaccgatttttcggatctaagagatatctgtatcaggataacgaacgagtggcacatatccatgtagtgaatggcacttattactttcacgggcatatcgtgccaggttggcaaggtgtgaaaaagatgtttgatacagccgaagagcttgaaacatatataaagcaacatggtttggaatacgagaaacagaagcaactaactttattttaaggagttggaaatgatgaaaatcaaaattgaaaaagaagtgaacttgcctgaacttatccaatggccttgggataaccccaaattatcaggaaataaaagattctatccaaatggtgttaggcacaactgtcatgtaacttttgatgttgatagcatcttatgtaatgtgactggatatgtatcaattaacgataaattcactattcaagaggagatagtaaacaatgaaaatcaaagtaaaaaaagaaatgaatttacctgaacttatccaatgggcttggaagaatcctgagctaacaacaggaaagaggttttgcacagaaaacaaagataatgaaaaatttatttatttttcttgggaggatggaagaaagtgttttactagttattttataacacctgaagatacttttgtagtcgaagttgaagaggaaatcacgggagatacagtatttgataggttgtttgaagtgtacgagatctcagaaggagaatataatcctacatcaaataggaatactagtataaacgaaagtttaaatgacgacagatgtttccctatcaaagcattctacatcttaaacgacgacctaactatgacgttaatctggaaagatggggagttgattaaataatggaacatggttcaaaagaatattacgaaaagcaaagtgaatactggtttgatgaagcaagcaagtttttgaagcaacgtgatgagcttattggggatatagcgaagttacgagaacacaacaaagagctggagaagaaagcgatcgcatgggataggtattgcaagagtgttgaaaaagatttaataaacgaattcggcaacgatgatgaaagagttaaatttggaatggaattaaacaataaaatttttatggaggatgacactaatgaataaccgtgaacaaatagaacagtcagttataagtgctagtgcgtataacggtaatgacacagaggggttattaaaagaaattgaagacgtgtataagagagcgcgagcgtttgatgaaatacttgagggaatgacaaatgctattcaacattcagttaaagaaggtattgaacttgatgaagcagtagggattatggcaggtcaagttgtctataaatatgaggaggaacagggaaatgactaacatcctacaagtgaaactattatcaaaagacgctagaatgcccgaacgaaatcataagacagatgcaggttatgacatattctcagctgaaactgtcgtacttgagccacaagaaaaggcagtgatcaaaacagatgtagctgtaagcattccagagggctatgtcgggttattaactagccgtagtggtgtaagtagtaaaacgcatttagtgattgaaacaggcaagatagatgcgggatatcatggtaatttagggattaatatcaagaatgaccatgaagatgacaaaatgcaaactatctttttaagagatattgataacgaaaaaattttcgaaaaagaacgtcatttatataagctaggtagttaccgtatcgaaaaaggagaacgtatagcacagttagttattgtacctatctttacgcccgaactaaagcaagtgaaggaattcgagagtgtttcagaacgtggagaaaaaggcttcggaagtagcggagtgtaaagacatattagataaggtcaaggaggttttggggaagtgagtataacaatattacttttgatagttttgggttatatgattttcgatattttaatcgagggatatttaaaagctaataacgctaatcgtgcagatatgtataagtggggggcgattataattcttgctataacacttggttttgcagatgcgtacgacaaaatggctattttagttctgttattagcaataagtttcgtagaaaaacttaagcgagttcaaaggagtgataagaagtgagtaagaaggaaatgtattatgttgtagaggttaataaagggatctatttatataataattatgcaggtggatatgattttactgacgacgttagacatgcgagaaaatatttgaatgctaaaaacgctagtgatgttgccagaaaatcaggtggaaaagtaatgtattacacaattacacatgaggttaaataatgacacaatacttagttacaacattcaaagattcaacaggacgtaaacatacacacataactcgagctaagagcaatcaaaggtttacagttgttgaggcggagagtaaagaagaagcgaaagagaagtgcgaggcacaagttaaaagagaggcagttattaaattaggtcagttgtttgaaaatataagggagtgtgggaaatgattaaacaaatattaagactattattcttactagcaatgtatgagctaggtaagtatttaacggagcaagtatatattatgatgacggctaatgatgatgtagaggcgccgagtgattacgtctttcgagcggaggtaagtgagtgatgtggattactatgactattgtatttgctatattgctattagtttgtatcagtattaatagtgatcgtgcaagggagatacaagcgctcagatatatgaatgattatctacttgatgaagtagttaaaactaaaggatacaacgggttaaaagaatacaggattgaattgaagcgaatgaataacgatattaaaaagtaatttatattatcggaggtattgcattgaatgataaagattgagaaacacgatatcaaaaagcttgaagaatacattcagcacatcgataactatcgaagagagttgaagatgcgagaatatgaattacttgaaagtcatgaaccagataatgcgggagctggcaaaagtagtttgccgggtaatccgattgaacgatgtgcaataaagaagtttagtgataacagatataatacattaagaaatatagttaatggtgtagatagacttatagatgagagtgatgaggatactcttgagttattaaggtttaggtattgggattgtcctattggttgttatgaatgggaagatatagcacattactttggtacaagtaagacaagtatattacgtagaaggaatgcactaatcgataagttagcaaagtatattggttatgtgtagcggacttttaccctatgtaagtccgcattaaaacagtttattatgttagtatcagattaatatttaaagttattaaatgctaatacgacgcatgaacaagaggcgcattactatgtgatgtgtctttttatttatgaggtatgaacatgttcaaactaattgtaaatacattactacacatcaagtatagatgcgtcttgatactacttaagttatataaggtgaaacattatgatgactaaagacgaacgtatacgattctataagtctaaagaatggcaaacaacaagaaaaagagtactagaaagagataattatgaatgtcaacaatgtaagagagacggcaagttaacgacatatgacaaaagtaaacataagtcgttggatgtagatcatatattatcgctagaacatcatccggagtttgctcatgacttaaacaatttagaaacactgtgtattaaatgtcacaacaaaaaagaaaagagatttataaaaaaagaaaataaatggaaagacgaaaaatggtaaatacccccgggtcaaaaaaatcaaaagcgatcaaaatgcttggggaacgggcaggggctcgacttcgcgataattttaaaaatccatgtataaccccccctcttataaccattttaaggcaggtgatgaaatggagattatagttgatgaaaacttagtgcttaaagaaaaagaaaggctgcaagtattatataaagacatacctagcaataaattaaaagtagttgatggtttaattattcaagcagcaaggctacgtgtaatgcttgattacatgtgggaagacataaaagaaaaaggtgactatgatttatttactcaatctgaaaaggcgccaccatatgaaagggaaagaccagtagccaaactatttaatgctagagatgctgcatatcaaaaaataatcaaacaattatcggatttattgcccgaagagaaagaagacacagaaacgccatctgatgattacctatgattagtaataaatacgttgatgaatatataaatttgtggaaacaaggaaagataattttaaataaagaaagaattgatctctttaattatctacaaacacatatatattcacgagatgatgtatattttgatgaacagaaaatcgaggattgtatcaaatttattgaaaaatggtattttccaacattaccatttcaaaggtttatcatagctaatatatttcttatagataaaaatacagatgaagctttctttacagaatttgccgttttcatgggacgtggaggcgggaaaaacggtctaataagtgctattagtgattttctttctacgcccttacacggagttaaagaatatcacatctccattgttgctaatagtgaagatcaagcaaaaacatcgtttgatgaaatcagaaccgttttaatggataacaaacgaaataagacgggtaaaacgccaaaagctccttatgaagttagtaaaacagaaataataaaccgtgcaactaaatcggttattcgatataacacatcaaacacaaaaaccaaagacggtggacgtgaggggtgtgttatttttgatgaaattcattatttctttggtcctgaaatggtaaacgtcaaacgtggtggattaggtaaaaagaaaaatagaagaacgttttatataagtactgatggttttgttagagagggttatatcgatgcaatgaagcacaaaattgcaagtgtattaagtggcaaggttaaaaatagtagattgtttgctttttattgtaagttagacgatccaaaagaagttgatgacagacagacgtgggaaaaggcgaacccaatgttacataaaccgttatcagaatacgctaaaacactgctaagtacgattgaagaagaatataacgatttaccattcaaccgttcaaataagcccgaattcatgactaagcgaatgaatttgcctgaagttgaccttgaaaaagtaatagcaccatggaaagaaatactagcgactaatagagagataccaaatttagataatcaaatgtgtattggtggtttagactttgcaaacattcgagattttgcaagtgtagggctattattccgaaaaaacgatgattacatttggttaggacattcgtttgtaagacaagggtttttggatgatgtcaaattagaacctcctattaaagaatgggaaaaaatgggattattgaccattgtcgatgatgatgtcattgaaattgaatatatagttgattggtttttaaaggctagagaaaaatatgggcttgaaaaagtcatagctgataattatagaactgatattgtaagacgtgcgtttgaggatgctggcataaaacttgaagtacttagaaatccaaaagcaatacatggattacttgcaccacgtatcgatacaatgtttgcgaaacataacgtaatatatggagacaatcctttgatgcgttggtttactaataatgttgcagtaaaggttaaacccgatggtaataaagaatatattaaaaaagatgaaaatagaagaaaaaccgatgggttcatggcttttgttcacgcattatatagagcagacgatatagtagacaaagatatgtctaaagcgcttgatgcattaatgagtatagatttctaatagaggaggtgagacatgagtattctagaaaagatatttaaaactaggaaagatatatcatatatgcttgatttagatatgatagaagatctatcacaacaagcgtatgtgaaacgtttagcgattgatagttgtattgaatttgttgcacgagctgtcgctcaaagtcattttaaagtattggaaggtaatagaattcaaaagaatgatgtttactacaagttaaatataaaaccaaatactgacttatcaagcgatagtttttggcaacaagttatatataaactaatttatgataacgaggttttaatcgtagtaagtgacagcaaagaattacttatcgcagatagcttttacagagaatattacgctttgtatgatgatatattcaaagatgtaacggttaaagattatacttatcaacgtactttcacaatgcaagaggtcatatatttaaagtacaacaataataaagtgacacactttgtagaaagtctattcgaagattacgggaaaatattcggaagaatgataggcgcacaattaaaaaactatcaaataagagggattttgaaatctgcctctagcgcatatgacgaaaagaatatagaaaaattacaggcgttcacaaataaagtattcaatacttttaataaaaaccaactagcaatcgcacctttgatagaaggttttgattatcaggaattatctaatggtggtaagaatagtaacatgcctttttctgaattgagtgaactaatgagagatgcaataaaaaatgttgcgctgatgatcggcatacctccgggtttgatttacggagaaacagctgatttggaaaaaaacacgcttgtatttgagaaattctgtttaacacctttattaaaaaagattcaaaacgaattaaacgcgaaactcataacacaaagcatgtatttgaaagatacaagaatagaaattgtcggtgtgaataaaaaagatccacttcaatatgctgaagcaattgacaaacttgtaagttcgggttcatttactagaaatgaggtgcggattatgttaggtgaagaaccatcagacaatcctgaattagacgaatacctgattactaaaaactacgaaaaagctaatagtggtgaaaatgatgaaaaagaaaaagatgaaaacactttgaaaggtggtgatgaagatgaaagcggagattaaaggcgtcatcgtttctaacgaagataaatgggtttacgaaatgcttggtatggattcgacttgtcctaaagatgttttaacacaactagaatttagtgatgaagatgttgatattataattaactcaaatggtggtaacctagtagctggtagtgaaatatatacgcatttaagagctcataaaggcaaagtgaatgttcgtatcacagcaatagcagcaagtgcggcatcgcttatcgcaatggctggtgaccacatcgaaatgagtccggttgctagaatgatgattcacaatccttcaagtattgcgcaaggagaagtgaaagatctaaatcatgctgcagaaacattagaacatgttggtcaaataatggctgaggcatatgcggttagagctggtaaaaacaaacaagaacttgtagaaatgatggctaaggaaacgtggctaaatgctgatgaagccattgaacaaggctttgcggatagcaaaatgtttgaaaacgacaatatgcaaattgtagcaagcgatacgcaagtattatcgaaagatgtattaaatcgtgtaacagctttggtaagtaaaacaccagaggttaacattgatattgacgcaatagcaaataaagtaattgaaaaaataaatatgaaagaaaaggaatcagaaatcgatgttgcagatagtaaagtatcagcaaatggattttcaagattccttttttaatacaaaaaataggaggtcataaaatgactataaatttatcggaaacattcgcaaatgcgaaaaacgaatttattaatgcagtaaacaacggtgaaccgcaagaaagacaaaatgaattgtacggtgacatgattaaccaactatttgaagaaactaaattacaagcaaaagcagaagctgaaagagtttctagtttacctaaatcatcgcagtctttgagtgcgaatcaacgaaaattctttatggagatcaataaaagtgttggatataaagaagaaaaacttttgccggaagaaacaattgatagaatttttgaagatttaacaacaaatcatccgttattggcggatttaggtatcaagaacgctggtttacgtttgaagttcttaaaatctgaaacttctggcgtagctgtttggggcaaaatctttggtgaaattaaaggacaattagatgctgcattcagcgaagaaacagcaattcaaaataaattgacagcgtttgttgttttaccaaaagatttaaatgattttggtcccgcatggattgagcgatttgttcgtgttcaaatcgaagaagcatttgcagttgcacttgaagctgcattcttaaaaggtacagggaataatgaaccgatcgggttgaatagacaagtacaaaaaggcgtttctgtgtcaggaaatgtttatccggagaaagaggaacaaggcacacttacatttgctaatcctcgtaaaactgtaaacgaattaacgcaagtgtttaaataccactcaactaacgagaaaggtaaatcagtagcggttaaaggtaatgtaacgatggttgttaatccatctgatgcgttcgagattcaagctcaatacacacatttaaatgccaatggagtgtatgttactgcattaccgtttaatttgaatgttattgagtctacagctcaagaatcaggtaaagttttaacgtatgttaaaggtttgtatgatggttatttagctggtggtattaatattcaaaagtatgaacaaacgcttgctttggatgatatggatttatacactgcaaaacaatttgcttatggtaaagcaaaagataataaagttgctgccgtttggaagttggatttaaaagatcaaaaaccaagtgctagcgatgacgaagaatcgctataaaaaatatgaggtgagaacaaatggctaaattcaaagtgattagagattttaaggatttagagcacaagcaacacaagtacaaagtaggtgatttgtacccagctgaagggtacgatagttctcgtgttgacttgttaacaaatcaggttaagaataagtacgacaaagtttatatcgtgcctttagataagctgacaaaacaagaattattggaactatgcgaattgtcaaatgtaaaaccttctagttcgatggttaaaagtgaaattattaacttattgaatggtgaaaacaatggcgattgatgatttgcttgtcaaattcaaatcactggaaaaaatcgactacaattcagaagatgagtttttaaaagaattgttgaaaatgtcatacacccgtttaaaaaatcagtgtggtacgtttgaattagacaacttagcaggtcaagaattgatattaaaccgcacaagatacgcttatcaagatttattagaacatttcaatgaaaattatagagctgatttaatagacttttcattatctctcatggaggtatcaaaaagtgaagaaagtatttaagaaacccaaaataacaactcggcgtttaaagacgcgtgtttatttttatgaatatgttgaaaacgccggccctgaagctggggaaaaagaaggaaaattattatacagttgttgggcaagtgttgatggcgtttggttacgagaattagaacaagctatctccaatggtacacaaaacgatatcagaatatatattcgagatcctcgtggcgattacttgcctaatgaagagcattatttagaaattgaatcaaagtattttcgaagccgtttgaacataaagcaaatatcaccagatttagataacaaggactttattatgattcgtggaggttatagttcatgagtgtgaaagtaacgggtgacagagctttagaaaacgaactagaaaaacgctttggtgtaaaagaaatggtaaaagttcaagacagggcattaattgctggtgctaaagtaatagttgaagaagttaaaaatcaactaaaaccatcaaaagatacgggtgcattgataaatgaggtaagttttactgaacctgaatggataagaggtaaacgcacaatcacgattcattggcgaggtcctaaagaccgttataaactcgtacatttgattgaaaatggtcatgttcaaaaaggcacgggtaagtttatcaaacctaaagctatgggtggcgttaatagagcaataagacaagggcaaaataagtattttgagacgctaaaaagggagttgaaaaaattgtgattgatattttgtacaaagttcatgaggtgattagtcaagacagaattattagagagcacgtaaatatcaataatattaagttcaataaatatcctaatgtaaaagatactgatgtaccttttattgttattgaagatatcgacgacccaatacctacaacttatactgacggatatgagtgcgcatatagttacattgttcaaatagatgtatttgtgaagtttaacaacaagtataacgcgagaatcataagaaataagatatctaatcgtattcaaaagttattatggtctgaactaaaaatgggaaatgtatcaaatggaaaaccggaatatatagaagaatttaaaacatatagaagcactcgtgtatacgagggcatcttttataaggaggaaaaataaatggcagtaaaacatgcaagcgcgccaaaggcgtattttaatatcactggtttagggttcgctaaattaacaaaagaaggcgcaaagttagaatatagcgatattacaaaaactagagggttacaaaaaattggtgttgaaactggaggagacttaaaaacagcgtatgctgatggtggtccaatcgaatcagggaatacagacggagaaggtaaaatttcgttacaaatgcatgctttccctaaagaaattcgcaagatcgttttcaatgaagagtatgatgaagatggcgtttatgaggaaacgcaaggtaaacaaaataactatgtagctatttggttcagacaagagcgccgagatggtacgttcagaacagttttattacctaaagttatgtttactaatcctaaaattgacggtgaaacggctgagaaggattgggatttctcaagcgaagaggttgaaggtgaggcacttttccctttaattgataataaaaaatcagtacgtaaatatatctttgattcagctaatatgacaaatcatgatggcaacggcgaaaaaggcgaagaggctttcttaaagaaaattttaggaaaagaatatacagttgaagcatcgggggatgaagagtctttgtagataaatcgacttcgccagaagttacggtaaagtcggttaatataccagatagcattaaaactttaaaagttggcaacacatacgatttaagtgttgtagtagagccatctgatcaaagtaagttattgaaatacacaacaaaacaaacagatattgtttctataagtgatgacggacaaataacggcaaaatcacaaggtattgctacagtaacggctatagccggaaacaaaagtgactcaattacaataaatgtagaaggttaatagggggggcccctctattttatttgaaaataaggagagtattataaaatggcaaaattaaaacgtaatattattcaattagtagaagacccaaaagcaaatgaagttaaattacaaacatacttaacaccacacttcatttcattcgaaattgtatatgaagcgatggatttagttgatgaaatcgaggacgaaaatagcacgatgaagccaagagaaatcgctgacagattgatggatatggttgtgaaaatttacgataatcaattcacagttaaagatttaaaagaacgtatgcatgcacctgatggaatgaatgcacttcgcgaacaagtggttttcattacacaaggtcaacaaactgaggaaactagaaattttatccagaacatgaaataaagcctgaagatttaacttataaagcaatgttgaaaaatatggatacgctcatgatggacttaatcgaaaatggtaaagatgctaacgaagttttaaaaatgccatttcattatgtactttccatatatcaaaataaaaacaatgacatttctgaagaaaaagcagaggctttaattgatgcattttaaccttaaccatttggttagggttatttttttgaacttttttagaaaggaggtaaaaaatgggagaaagaataaaaggtttatctataggtttggatttggattcagcaaatttaaatagatcacttacagaaattaaacgaaactttagaaccttaaattcagacttaaagttgactggaaacaactttaaatatactgagaaatcaactgatagttataaacaacgaatcaaagagttagatggcactattgcaggttataagaaaaatgttgacgacctagccaaacagtatgacaaagcagctaaagaacaaggtgaaaacagcgcggaagctcaaaaattacgacaagaatataacaaacaagcaaatgagctgaattatttagaaagagaattgcaaaaaacatcggctgagtttgaagagttcaaaaaagcccaagttgaagcccaaagaatggcagaaagtggctggggaaaaaccagtaaaatttttgagagtatgggacctaaattaacaaaaatgggcgacggtttaaaatccattggtaaaggtatgatgattggtgttactgcacctgttttaggtattgcagcagcatcaggaaaagcttttgcagaagttgataaaggtttagatacagttacccaagcaacaggagcaaccggcggagagcttaagaagttgcagaattcatttaaatatgtttatggcaactttccagcagacgctgagactgtaggcggtgttttaggagaagttaacactagattgggctttactggtaaagaacttgaaagtgcgacggaatcattcttgaaatttagtcatataactggtactgatggcgttcaagctgttcaactcataacacgtgcaatgggtgacgcaggtgttgaagtagatgaataccaaggtattttagatatggtagcgaaagcagctcaagctagcggtataagtgttgatacattagctgatagtattactaaatacggtgctccaatgagagctatgggctttgagatgaaagaatctatcgctttattctctcaatgggagaagtcaggtgtaaataccgaaatcgcatttagtggtttaaagaaagcgatttctaactggggaaaagcaggcaaagacccaagagaagaatttaaaaagacattggcagaaatcgagaagacaccagatatagctagtgcaacaagtttagcgattgaagcatttggtgcaaaagcaggtcctgatttagcagacgctattaaaggtggtcgctttagttaccaagagttcttaaaaactatcgaagattcgcaaggaacggtcaatcaaacttttaaagattctgaaagtggttcagaaagatttaaagtagcaatgaataaacttaaattagtaggtgctgatgtatgggcttctattgaaagtgcgtttgctccagtcatggaagaattaataaaaaagctatcagtcgctgtcgattggttttccaatttaagtgatggttataaaagatcaattgttattttcggtggtattgctgctgcaattggtcctgtagtttttgggttaggtgcatttataagcacaattggtaatgcagtaactgtattagccccactattagctggtattgcaaaggctgacggattgattagttttttatcaactaaagtgcctattttaggaacagtcttcacggcattaactggtcctataggaattgtattaggtgtattagctggtttagcggtggcattcacaatagcttataagaagtcggaaacgtttagaaactttgtgaatggcgcaattgacagtgtcaaacaaacgtttagtaatttcattcaatttattcaaccattcattgactctgttaaaaacattttcaatcaagcgatatcagcgattgttgattttgctaaagatatttggagtcaaatcaatggattctttaatgaaaatggaatttccattgttcaagcgcttcaaaatatatgcaattttatcaaagctatatttgaatttatcttaaattttgtaattaaaccaatcatgtttgcgatttggcaagtgatgcaatttatttggccggcggttaaagctttgattgtcagcacttgggaaaatatcaaaggcgtaatacaaggtgctttaaatataatacttggctttattaagttcttttcaagtttattcactggtaattggcgaggtgtttgggacggcattgtaatgatactgaaaggtactgtgcagttaatttggaatttaatacaactgtggtttgtaggtaaaattctaggtgtagtgaagtactttggtggattgcttaaaggtttaataactattatatgggttgctataataggcgttttcaagaaatcattatcggcaatctggaatgcgacaaaaagtattttcggtttcttatttaatagtgtcaaatcaatttttacgaatttgaaaaattggttatctaacacgtggagcagtatccgtacgaatacgataggaaaagcacagtcattatttagtggcgtcaaatcaaaatttactaatttatggaatgcgacgaaagatatatttactaaattaagaaattggatgtcaaacatctggaactctattaaagataacactgtaggtatagttggtcgcttatgggatagagtgcgtaacatctttggaagcatgcgtgacggtttaaaatctatcattggtaaaattaaagatcatatcggtggtatggtagacgctgttaaaagaggtcttaataaattaattgaaggtttaaactgggtcggtggtaagttgggtatggacaaaataccgaagttacacactggtactgaacatacgcatactactacaagattagttaagaacggtaagattgcgcgggatacgttcgctacggttggggataaaggacgtggaaatggtccgaatggtttcagaaatgaaatgattgaattccctaatggcaaacgggtacttacgcctaatacagatacaacagcgtacttacctaaaggttcaaaagtatataacggcgcacaaacttattcaatgttaaatggaacacttccaagatttagcataggtactatgtggaaagacattaaatccgggcatcatcggcatttaactggacaaaagatcaaataggtaaaggtacaaagtggcttggcgataaagttggtgatgtcatggactttatcgataatccaggcaaacttttaaattatgtacttcaagcgtttggagttgatttcagttctctaactaaaggtatgggtattgctggcgatataacaaaagctgcatggtctaagattaagaaaagtgcaatcaagtggcttgaggatgctttcgcagagtcgggtgatggcggtgtattagatatgagtaaattacgttatttatacggtcacactgctgcttatacacgagaaaccggacgcccattccatgaaggtctggattttgattacatttacgaacctgttccatcaaccattaatggtagagcacaagttatgccttttcataatggtggttatggaaaatgggtaaaaattgtaaagggcgccttagaagttatttatgcacatttatctaaatataaagttaaaactggtcaacaagttagggtcggccagactgttggtatatcggggaatacggggtttagtacaggacctcacttacattatgagatgcgttggaatggaagacatagagacccgttaccgtggttaagaaagaataatgggggcggcaaaagtgcacccggtggtaatggtgcagctaatgctagacgagctattaaggctgctcaaaatattttaggaggaaggtataaggcgagttggattactaacgagatgatgcgtgttgcgagtcgtgaatccaattatacagctaatgcagtcaataattgggatagcaacgcaagagctggtataccttcaagaggtatgttccaaatgatagatccttcatttagagcgtacgcaaagtcgggttacaataatcctctcaacccaactcatcaagctatatcggctatgagatatattgtgggtaaatgggtaccaagaacaggctcatggagagctgcgttcaaacgcgctggtgattacgcatatgctactggtggcaaagtctacaacggattgtaccacttaggagaagaaggatatccacctttaagggtacctactgatcctgcacgtaaaaacgaagcaatgaagatgttacattatgcagcagcagaagtaagagggagaaaagcgagtaaaaataagcgtcctagtcaattgtctagtgtaaatgggtttgatgacccaagcttattattgaaaatgattgaacaacagcaacaacaaatagctttattactgaaaatagcgcaatccaacgatgtgattgcagataaagattatcagccgattattgacgaatacgcttttgataaaaaggtgaacgcgtctatagaaaagcgagaaaggcaagaatcaacaaaagtaaagtttagaaaaggaggaattgctattcaatgatagacactattaaagtgaacaacaaaacaattccttggttgtatgtcgaaagagggtttgaaataccctcttttaattatgttttaaaaacagaaaatgtagatggacgttcggggtctatatataaagggcgtaggcttgaatcttatagttttgatatacctttggtggtacgtaatgactatttatctcacaacggcattaaaacacatgatgacgtcttgaatgaattagtaaagttttttaactacgaggaacaagttaaattacaattcaaatctaaagattggtactggaacgcttatttcgaaggaccaataaagctgcacaaagaatttacaatacctgttaagttcactataaaagtagtgttaacagatccttataaatactcggtaactggaaacaaaaacaccgcgatttctgaccaagtttcagttgtaaatagtgggactgctgacactcctttaattgttgaagcccgagcaattaaaccatctagttactttatgatcactaaaaatgatgaagattattttatggttggtgatgatgaagtaaccaaagaagttaaggattacatgcctcctgtttatcatagtgagtttcgtgatttcaaaggttggactaagatgattactgaagatattccaagtaatgacttaggtggtaaggtcggcggtgactttgtgatatccaatcttggcgaaggatataaagcaactaattttcctgatgcaaaaggttgggttggtgctggcacgaaacgagggctccctaaagcgatgacagattttcaaattacctataaatgtattgttgaacaaaaaggtaaaggtgccggaagaacagctcaacatatatacgacagtgacggtaagttgcttgcttctattggatatgaaaacaaataccatgatagaaaaatagggcacattgttgttacgttgtataaccaaaaaggagacccgaaaaagatatatgactatcagaataagccggtaatgtataacaaagacagaattgttgtatacatgagactcagaagagtaggtaataaattttctattaaaacttggaaatttgatcacattaaagacccagatagacgtaaacctattgatatggatgagaaagagtggatagatggcggtaagttttatcagcgtccagcttctatcatagctatctatagtgcgaagtataatggttataagtggatggagatgaatggattaggttcattcaatacggagattctaccgaaaccgaaaggcgcaagggatgtcattatacaaaaaggtgatttagtaaaaatagatatgcaagcaaaaagtgttgtcatcaatgaggaaccaatgttgagcgagaaatcgtttggaagtaattatttcaatgttgattctgggtacagtgaattaatcatacaacccgaaaacgtctttgatacgactgttaaatggcaagatagatatttatagaaaggagatgagagtgtgatacatgttttagattttaacgacaagattatagatttcctttctactgatgacccttccttagttagagcgattcataaacgtaatgttaatgacaattcagaaatgcttgaactactcatatcatcagaaagagctgaaaagtttcgtgaacgacatcgtgttattataagggattcaaacaaacaatggcgtgaatttattattaactgggttcaagatacgatggacggctacacagagatagaatgtatagcgtcttatcttgctgatataacaacagctaaaccgtatgcaccaggcaaatttgagaaaaagacaacttcagaagcattgaaagatgtgttgagcgatacaggttgggaagtttctgaacaaaccgaatacgatggcttacgtactacgtcatggacttcttatcaaacgagatatgaagttttaaagcaattatgtacaacctataaaatggtattggatttttatattgagcttagttctaatactgttaaaggtcgatatgtagtactcaaaaagaaaaacagcttattcaaaggtaaagaaattgaatatggtaaagatttagttgggctaactagaaagattgatatgtcagaaatcaaaacagcattaattgctgtgggacctgaaaatgacaaagggaagcgtttagagctagttgtgacagatgacgaagcgcaaagtcaattcaacttacctatgcgctatatttgggggatatatgaaccacaatcagacgatcaaaatatgaatgaaacacgattacgttctttagccaaaacggagttaaataaacgcaagtcagcagtcatgtcatatgagattacctctactgatttagaagctacgtatccgcatgagattatctcaatcggagatacagtcagggtgaaacacagagattttaacccgccattgtatatagaggcagaagttattgccgaagaatataacataatttcagaaaatagcacatatacattcggtcaacctaaagagttcaaagaatcagaattacgagaagagtttaacaaacgattgaacataatacatcaaaagttaaacgataatattagcaatatcaacactatagttaaagatgttgtagatggtgaattagaatactttgaacgcaaaatacacaaaagtgatacaccgccagaaaatccagtcaatgatatgctttggtatgatacaagtaaccctgatgttgctgtcttgcgtagatattggaatggtcgatggattgaagcaacaccaaatgatgttgaaaaattaggtggtataacaagagagaaagcgctattcagtgaattaaacaatatttttattaatttatctatacaacacgctagtcttttgtcagaagctacagaattactgaatagcgagtacttagtagataatgatttgaaagcggacttacaagcaagtttagacgctgtgattgatgtttataatcaaattaaaaataatttagaatctatgacacccgaaactgcaacgattggtcggttggtagatacacaagctttatttcttgagtatagaaagaaattacaagatgtttatacagatgtagaagatgtcaaaatcgccatttcagatagatttaaattattacagtcacaatacactgacgaaaaatataaagaagcgttgggaataatagcaacaaaatttggtttaacggtgaatgaagatttgcagttagttggagaacctaatgttgttaaatcagctattgaagcagctagagaatccacaaaagaacaattacgtgactatgtaaaaacatcggactataaaacagacaaagacggtattgttgaacgtttagatactgctgaagctgagagaacgactttaaaaggtgaaatcaaagataaagttacgttaaacgaatatcgaaacggattggaagaacaaaaacaatatactgacgaccagttaagtgatttgtccaataatcctgagattaaagcaagtattgaacaagcaaatcaagaagcgcaagaagctttaaaatcatacattgatgctcaagatgatcttaaagagaaagaatcgcaagcgtatattgatggtaaaatttcggaagaagagcaacgcgctatacaagacgctcaagctaaacttgaagaggcaaaacaaaacgcagaactaaaggctagaaacgttgaaaagaaagctaatgcttatacagacaacaaggtcaaagaaagcacagatgcacagagaaaaacattgactcgctatggttctcaaattatacaaaatggtaaagaaatcaaatcaagaactactaaagaagagtttaatgcaaccaatcgtacactttcaaatattttagctgagattgtccaaaacgttacagatggaacaacaatcagatatgatgataatggggtggctcaagctttaaatataggaccacagggaattagattaaatgctgataaaattgatattagcggtaatagagaaataaatcttcttatccaaaatatgcgagataaagtagataaaaccgatattgtcaacagtcttaatttatcaagagagggtcttgatatcaatgttaatagaattggaattaaaggcggtgacaataacagatatgttcaaatacagaatgattctattgaactaggtggtattgtgcaacgtacttggagagggaaacgttcaacagacgatatttttacgcgactgaaagacggtcacctaagatttagaaataacaccgctggcggttcactttatatgtcacattttggtatttcgacttatattgatggtgaaggtgaagacggtggttcatctggtacgattcaatggtgggataaaacttacagtgatagtggcatgaatggtataacaatcaattcctatggtggtgtcgttgcactaacgtcagataataatcgggttgttctggagtcttacgcttcatcgaatatcaaaagcaaacaggcaccggtgtatttatatccaaacacagacaaagttcctggattaaaccgatttgcattcacgctgtctaatgcagataatgcttattcgagtgacggttatattatgtttggttctgatgagaactatgattacggtgctggtatcaggttttctaaagaaagaaataaaggtcttgttcaaattgttaatggacgatatgcaacaggtggagatacaacaatcgaagcagggtatggcaaatttaatatgctgaagcgacgtgatggtaataggtatattcatatacagagtacagacctactgtctgtaggttcagatgatgcaggagataggatagcttctaactcaatttatagacgtacttattcggccgcagctaatttgcatatcacttctgctggcacaattgggcgttcgacatcagcgcgtaaatacaagttatctatcgaaaatcaatataacgatagagatgaacaactggaacattcaaaagctattcttaacttacctattagaacgtggtttgataaagctgagtctgaaattttagctagagagctgagagaggatagaaaattatcagaagacacctataaactggatagatacgtaggtttgattgctgaagaggtggagaatttaggattaaaagagtttgtcacgtatgatgacaaaggagaaattgaaggtatagcgtatgatcgtctatggattcatcttatccctgttatcaaagaacaacaactaagaatcaagaaattggaggagtcaaagaatgcaggataacaaacaaggattacaagctaatcctgaatatacaattcattatttatcacaggaaattatgaggttaacacaagaaaacgcaatattaaaagcgtatatacaagaaaataaagaaaatcaacaatgtgctgaggaagagtaatccttagcactatttttatacaaaaatttaaggaggtcattcaagtatggcaaaagaaattatcaacaatacagaaaggtttattttagtacaaatcgacaaagaaggtacagaacgtgtagtatatcaagatttcacaggaagttttacaacttctgaaatggttaaccatgctcaagattttaaatctgaagaaaacgctaagaaaattgcggagacgttaaatttgttatatcaattaactaacaaaaaacaacgtgtgaaagtagttaaagaagtagttgaaagatcagatttatctccagaggtaacagttaacactgaaacagtatgaaaagctatgagttagatactcatagtttttattcttttagaaagcgggtgttgttttggatgaaattcagaagataaaaaacgaacttgctgatttgactactaaagtagatggcgtgaaagaagaattaacaacaagggttgatgatatagaggtattagccaatgaaactgccgatcatgtacttaaccttagacaagaacacacagaacatcacaatgaattaagagagtctcacaaagagttaaaagacaagcaagaaaaagtggttgatgaaaatttagaacaaactaaaatattaaaccgaattgaagaaaggtatcaagtgcaagtcgatacggcacaaaagaacgaagaaaagacacttgcgcaaaacaagtggcttgtaggtgcaatatgggcattagtaactattgtaatgatagctgtgattactgcttcaattactgcattgataccttagtaggaggtggaaataatgagttgggcgagatggttatcttgttatttatacggtcgtaaatgtaaataagtttttagtcagtgctccggcactggctttttattttgattgaaaagaggtgcatacaggaggttatctaatccaaaagataggaggcctaccgcaagtgaagtagtagagtagtgtcgacatcaagaaagtatgatatataaattctaaaacaaaataaatttgaaatcattttattatattagagaaaaatataaacagggtatggtaatataaaaagcgagtaaaacatataaatgatggctagtctcttgctgtaataaggtgataattattttataattgttgaacttaactaaataattatttaacaaaaatgactatcacccaaaagtgttagataataaccaatttttatcaaaattatgttttagaggtgagtagaatgaaaaaaaggaagacagcgtttatactaactttatgtattgtcataatgttagtaacaagcccgcttgtaaatggtagtgagaagagcgaagaaataaaagaaaaggatttacacaaaaagtctgaattgcaaggagtagctttagacaatcttagacaaatctattatcacaacggaaaggctataactgaaaataaggagagtgacaatcagtttttacagcatacaatattgtttaacggttttttcacagatcacccatggtataacgatttattagtggattttgattcaaaagttcttgctgataaatataaagggaaaaaagtagacttatatggtgcttattatggttatcaatgtgcgggtggtacaccaaacaaaacagcttgtatgtatggcggtgtaacgttacatgataataatcgattgaccgaagagaaaaaagtgccaatcaatttatggctagacggtaaacaaaatacagtacctttggaaacggttaaaactaataaaaaagaagtgactgttcaggagctagaccttcaggcaagacattatttacatggaaaatataatttatataactcggatacgtttgatggaaaggtgcagagaggattaatcgtgtttcatacttctacagagccttcggttaattacgatttatttggtgctcaaggacagtattcaaatacgctattaagaatatatagagataataaaactattaactctgaaaacatgcatattgatatatatttatatacaacttgagtgtaatttttagttaaacaactttttaaatctataaaaaatgtcatcggtcattaattactctgcttaaaatattcactttttactgctgtttgtaaatttcacaaaatatttctgcagattgttttgaacatagtgagagtaatcaaaagtatataaacagtaaaaaatcatatgtgatataatattgattgagcaagttggatagatggtggctatctgagtataaggaggtggtgcctatggtggcattactgaaatctttagaaaggagacgcctaatgattacaattagtaccatgttgcagtttggtttattccttattgcgctaattggtctagtaatcaagcttattgaattaagcattaaaaaataaccatctcacgcaactttgaccggttttgagatggtttataaatatccattttaaaatagtcaccgtctttttaacgggctcattagggtaacatgtttccgcatgttgcccttttctatatataaattaacacatcataatataaatatcaaatagacggcttattagtcgtctttttattttggataaaaggagcaaacaaatggatattaactggaaattgagattcaaaaataaagcagtattaacaggtttagttggtgcattgttgctatttatcaagcaaatcacggatttattcggattggatttatctactcaattaaatcaagctagtgcgattataggcgctatcctcacgttacttacaggtatcggggttattactgacccaacgtcaaaaggtgttgctgattcgtctatagcacagacttatcaagcgcctagagatagtagcaaagaagaacaacaagttacgtggaaaacttcacaagacagtagtttaacgccggaattaagcacgaaagcaccgaaagaatatgatacatcacagccgtttacagacgcctctaacgatgttggctttgacgtaaacgaatatcattatggaggtggcgacaatgcaagcaaaactaactaaaaaagagtttatagagtggttgaaaacatctgagggaaaacaatttaatatcgacctttggtatggatttcaatgctttgactatgccaatgcaggttggcaagtcttatttggctacaacttaaaaggtgtaggtgccaaagacatcccaagtgctaataattttaacggactagctactgtataccaaaatacaccagacttcttagcgcaacctggcgacatggttgtgttcggtagcaactacggtgctggatatggtcacgtagcatgggtaattgaagcaactttagattatatcattgtgtatgagcagaattggctcggcggtggctggacagacggtgtacaacaacctggctctggttgggaaaaagttacaagacgccaacacgcttacgactttcctatgtggtttatccgtccgaacttcaaaagcgaaacagctccacgatcagtacaatctcctacacaagcacctaaaaaggaaacagctaagccacaacctaaagcggtagaacttaaaatcatcaaagatgtagttaaaggttacgacctacctaagcgtggtagtaaccctaaaggcgtaaataatagtgaatttttcataaatatgatatagtacctttataatgatataggggtgctgatatgacagagatttggaaagatgttataaattacgaaggttattatatggtttcgaatatgggcagagttaagtccttaaaaagagttgttaaacatggaggctctgtgacaagaacttacccgactgtgattttaaaaccaaataaagtagcatttgattattttcaagtcactttaaataaaaatagcataagaaaatcaagatacgttcacaatttggttatggaagcatttgtcggagagaagaagttaggttatgaagttaatcataaaaacgaagataaaagtgataatcgtctagaaaacctagaatatataacttctaaagaaaataataattatggaactagaatcgaaagatctattaaaaaatctacaaatggtaaaagaagtaagaaaatcaaaggaactcatataattactggagaagaagtttattttccatctattgctgaagcaaaaagacagggatatggtaatcatattagcgacgcaatacgtggtaaaagaaatcactgttataaatataaatgggaattcatttaagcgctgcatatatagcgatgtatatgtactaaaaacataaattgctttgaagaaccttagagccttaataccacaataaagctgaaaagactttgtgaaggtttaacaagtttaaggattggtttgtttagcagcactactcctaaatacttcttagtacaaggagaatgttcaacgactagaggattgcgtcctcgtagggttcaagtgaactcgaaagaagaactatctcatgtagatagaaacatatagtctggtcacgtcttgtaatgagagtgctagggataaacctagagttagattaacgacctaacaaaacaaacgtagttatacacaacgacgcaggaagcaaaggggcaacagcagaagcgtatcgaaacggattagttaacgcacctttatcaaggcttgaatcaggtattgcacatagttatgtctcgggtaacacagtatggcaagccttagatgaatctcaagtaggttggcatacagctaaccaagaaggaaataaacattattacggtattgaagtgtgtcaatcaatgggtgcagataactcgacgttcttaaaaaatgaacaggcaactttccaagagtgcgctagattgttgaaaaaatgggggttaccagcaaacaggaacacaatccgattacacaatgaatttacttcaacgtcatgcccgcacagaagctcagtattgcatactggttttgacccagtaacgcgtggtttattaccagaagataaacgactacagcttaaagactactttatcaagcagattagggcgtacatggatggtaaaataccggttgccactgtctcaaacgagtcaagcgcttcaagtaatacagttaaaccagttgcgagtgcatggaaacgtaataaatatggtacttactacatggaagaaagtgctagattcacaaatggcaatcaaccaatcacagtaagaaaagtggggccattcttatcatgtccagtgggttatcagttccaacctggtgggtattgtgattatactagcgtgttactccaagataaccacgtatggcttgaatacgaatggcaaggaaatttctactatattcctattcgttcatgggacggaacaccgcctcccaatcaaatagttggggaactttggggcactattagttaatatgttataattaatatccaccacatcatttggcaggtacttcggtgcttgcctatttttttatgttataatgtaattacattaccagtaaccaatctggcttaaaaccacatttccggtagccaatccggctatgcagaggacttactagcgtaaagcagtaagaagctgactgcatatttaaaccacccatactagttgctgggtggtttttatgttataatataaatgtgaaatggtcattcttgaaatgactcggtcgctactggcacagaccgtttaaagtgtcatcactacatgaactgagaattcatatgacgttgctgacgagcgacaaagctctgtgttcctgaatgggagtaggtttgtgtggtggtataatttagtaacagcatagactgtctatagcaaagttgccgaagagattctaaacgtatttataaatacgtggcccttgctagataaccgcatcttaactgatgcggttatttttatccccacacaaccaacaaaaccacaccacctattaatttaggagtgtggttaatttttattggaagtgtgtatcaggtatcaggatacctcatctgccaattaaaatttgttaatttaataattaaataaaaagacgattaattagtttttacgttttctaggtaatacgaatgcaacgatgctacttaaagctaaaaatgccattaatggtaatgtcatatctttatttgattcttcaccagtttgtggtaatgattttgctttattttcttgtgtatttttattgttttggctttgagtgtgtccatcatttgtgtttttaatgtttgctttttgtaatggagcactatcttttgcttcgctagaacctgctgaagtttgaacaacatctattgttgtttctgatgaagcagttgttggttttgcaacattttgagtcgtagatactaccttagttggagttgtactacttgattctacttcagctttagctggttttgtagaaggcgttttgtctttacctgactcactagatgcgtcattttctttttcaacacttggtgattgtttattgtcatctttttggctgtcttgtttttgtgattctttttcaacaggtgatggtgttggtttgctaggcttagctggagtagtttccttcttagctgagttatcttgttgttcctttttattagatttatcggcattggcttttgtaaatgcttctttatcaacgattctgacatggtattgtccatcataatcaatagtttttacgtgaactttaacgatagcatcatatagagttttaccttcaatatatgggaaaataatcgttctagtgttatttttagcatctttgctaattgttctaacacgttgaccttcaaccatgaaatctttccagtaatcgtcattagtagtttccattaccatatattttttgccgttaagcatacctgttttaatagggtgtttaacaaaagtatccatcatagattcgttattctcaacactttcataaacaacatattttgtatcttgtaaatcagtcattttttcatttgttggttgtacattttggaattcagttatcgcagatttcacttgttcatctaaagcttttttcgtctcttctaatttcttcttgtattcagctttcaatttttcaggaagtttatcttgaattttatttaattcataaacttgtctttctagtgttttcgcttttttatatggcgctaataatttttcagctttataatcttcttcagttttgaatttttctgcactgttataaattggttgtgcgaattccattaatgtgtaatcgtatttttcttctttgttattgaagtgagttgaacttacaattttaacggcttttgttccatttgaaacagagaagcgaatgtaagcataatctttaacagtatcgtatgatactaatttaattggtaactttttgtcaccttcataaacttcaaattttctccaaaattgccctgattgtaaacctaattctatttctggttttgaatcagtgaaaataactctagctggtttaacagagcttgcataatgataaaattgttgctcaccgttttcttttttcatttcaaaatcaattggacgagagtttggtgcgctatgatctttatcttttattgcagggtttttaatcgcttctcttagttcctgattcaaaataggatatgtattgttatcggcttttgctcctggtttaacttcttttgtttccttaggggctttaacttctttagcttcttttgtttcagaagtaggggcctcaacttctttattagatactgagacagcattggctactggtttagcttctggagctttttcagttgttgttgatggacttgcaactgcttcagtttttggttgtgcttctgtatttgtaccacctgtttcttcagctgcttgtgcttcgctatttgacattaataataaaagtgtactaatcgctacagatgcaacgcctaatgatgactttctaattgaataaaatgatttaaattctttttgctgtttgttcatgttgtagaaacaactcctaattgtatattatcaactgataatcattatcaattgattacttgtattgtacattgaaatggtagttaattgcaacgttattttataaaaaaataacctatgttatagattatggaatatctacgacataggttaaataaaatttaaaataaaaaatatattaagttatgagtgtgacgatgatttatttagattcttttcttttgaaaagtaacaaagataatgaacctaaaagggcaagtgttgcgaaggcaactgtgctaataaagttatcaactgaagttaaaccagttttaggtaattctttagctttagaatcttttgaagtttcttgtttatgaacttcgttttgttttgtaactttgttagtttgttgtgatttattgtcacttacagcttgattgttgctttcagatttcgctgttgcaacatctttaacaggtgtttgaactttattttgttcttgagctgtttgagttgttttcactgtatgagcactttgtgttttagtttgatcttttgttgtatcagtacttacaactttagtagagtgattgtcttcaactttgcttgttgtagttacagtaggtttaactttttcaattttaggttgaactggtttagtttgctcagtaggtgttttaggttgagcaggttttggttgaaccggtttaacattgtttggttttgctgcgtcagctaatgtaggaattgctttttcaaattctaaatgcgtagtatatctatgattgtaattaatttgtggcacgacaatatgtactttagtagttaaactcttatacccaggttcaacagcaacattgattgttctagtgtcagcttttttatcatcgttaacaacagttgttgctaattcttgattgtttgcattgtaaaatttgtattctttccagaatgatgcgctgtttaatacagcttggaaataatatttattattttgtttaatcacttttccagggtgttgcatatagtcatccatgtgtgacttctctgaagagccatctttttgcacttggaaattaattggttgtgatgttgcttgagatacttgtgcgctttgattattagttgcgttcgtagcttctgttgccgcatttacttgttggctgtctgcgcctatgtatacaagggaacctaaaatgatagatgctgtacccattgtaatctttttcatagctgatgaacgttgttctgattgatacttactgtttaaataatgttttgtcatgttgttttcctcctaaggatacaaattatgtgttgttatatgagatgattaaccattgcaattgataatggttatcaattatactagcacatctattttcgtataacaataataaattgattataaaataaatattgacaatgataattattattatttatgattttagtaaagacttaaaagcaatcataaaaaggaggattatgttttgaaaaaatattttaaaagtttttaatacaacgattttagcgttaattatcatcatcgcgacattcagtaattctgcaaatgccgcggatagcggtactttgaattatgaggtttacaaatacaataccaatgacacgtcgattgctaatgactattttaataaaccggcaaagtacattaagaaaaatggtaaattgtatgttcaaataactgtaaaccacagtcattggattacagcaatgagtatcgaaggacataaagaaaatattattagtaaaaacactgccaaagatgaacgtacttctgaatttgaagtaagtaagttgaacggtaaaatagatggaaaaattgacgtttatatcgatgaaaaagtaaatggtaagccattcaaatatgaccatcattacaatattacatataaatttaatggaccaactgatgtagcaggtgctaatgcaccaggtaaagatgataaaaattctgcttcaggtagtgacaaaggatctgatggagcgactactggtcaaagtgaatctaacagttcgaataaagacaaagtagaaaatccacaaacaaatgctggtacacctgcatatatatatgcaataccagttgcatccttagcattattaatcgcaatcacattgtttgttagaaaaaaatctaaaggcaatgtggaataatgagaaatgttaaacaaattgctacaaaatctattatagctattattagcttaggtatacttacatatacaacaatgattggtagcgtgttggctgatgagataaaatatccatcagccaaatttaatcaacctgaagcaaaagataaaacagaattaacttcatcaatttttgatgaaaagataaaagagaataaagcgttagagttactaatttttaatcaagaaaataaaaatgtaactgaggaacaacaactagttgacgaaaaggcgcaattgatttcagatatgactggtaaaatttacttgcaagtaaaactaaaaggtcaaattgataaagaacaacttgtatttcaaaatgacaaaaatgaagaatttccttttgttataaaagatgaaaaggatgacacaatagtaagaattttaattgaacagcatatggataaaatcaatatgcatgttaaaacgttggatgaaaagaaaaatctagataacaaagaaatggtgtattctattcattttaaagagaaaaaagtacaacatgatgatgcaaaagaagtgccttcaaaacatcaaaatcaagaaaataatcaagatcagcttaaaaaagatattgatgacaaaaaagatagtcaaaaatcagatattaaggaaagacgtactagcctttttactgaaaaaggattaaatgatattcctgtacaaaaagataaagtgcaacaagacagtaataaaaagattgaaaatgagcgacctaaagcatcaggtacattaaaagttgaaaatagccctccaacagtaaaaaaggttgaaaatgatcacaaagagcaaccgaaacataaagatgaaaaatcaaaaaaggaaaagaaaaaagtagttgaaaaagaaaaagcgttaccagcttttaatagagatgatgatagcaagaatagtagtcaattatctagtgatattaaagaacttgatgaaccaaatcataaaaagcaatatatgttatttgcagctggcattgtgttagcaaccattttacttatttcggcacatttatacagcagaaagagaggtaaccaagtttgagaatcataaagtatttaaccattttagtggtaagcgtcgttatcttaaccagctgtcaatcttccagttctcaagaatcaactaaatccggcgaattcagaatcgtaccaacaactgttgcattgacaatgacattggacaaattggatttaccaattgtcggcaaacccaagtcatataagactttgcctaatcgttataaagatgtaccggaaattggtcaaccaatggagccgaatgttgaagctgttaaaaagttaaaaccaacacatgttttgagtgtgtcaacgattaaagatgaaatgcaaccattttacaaacaattaaatatgaaaggctacttttatgattttgatagtttaaaagggatgcaaaagtcgattacacaattaggtgatcaatttaatcgtaaagcacaagcaaaagaattaaatgaccatttaaattctgtaaagcaaaaaattgaaaataaagcagctaaacaaaagaaacatcccaaagtattaatattaatgggtgtaccgggtagctatttagtagcaactgataaatcatatattggtgatttagttaaaatagcaggtggagaaaatgttattaaagtgaaagatcgtcaatatatttcgtctaatactgaaaatttgttgaatatcaatccagatattattttacgattaccacacggaatgcctgaagaagttaagaaaatgtttcaaaaagaatttaaacaaaatgatatttggaaacattttaaagctgtgaaaaataatcatgtttatgacttagaggaagtgccattcggtattacagcaaatgttgatgctgataaggcaatgactcaattatatgatttattttataaggataaaaaatagtgagttgatatgatgataaaaaataaaaagaaactactatttttatgtttgttagtcattttaatcgcaacagcttatatttcatttgtaaccggtacaattaaattgtcatttaatgacctaattacaaaatttacaactggtagcaatgaagcagtggattcaatcattgatttgcgattgccacgtatattaattgcaatgatggttggcgcaatgttagcagtttctggagcattattacaagcagcactacaaaatcctttggcagaggcgaatatcattggcgtttcatcaggtgcacttataatgagagcactttgtatgttgtttattccacaattgtacttttacttaccattattaagttttattggtggtttaataccatttttaataattattgtgttgcattctaaatttagatttaatgctgtaagtatgatattagtaggcgttgcgttattcgtattattaaatggcgttttagaaattttaactcaaaaccctttaatgaaaattcctcaaggcttaacaatgaaaatatggagcgacgtatacatattagcagtatcagcattattgggattaatattaacattactattgtcccctaaattgaatttactaaatttagatgacgtacaagcgcgaagtatcggttttaatattgatcgttacagatggttaacaggtttattagcagtatttttagcaagtgcaactgttgcgattgttggacaactagcctttttaggtattattgtgccacatgtggttagaaagctagttgggggcaattacagagtacttattccgttttctacagttattggtgcatggctattgttagtggctgatttattaggacgagtgttacagcctcctttagaaattccagccaatgctattttaatgattgtcggtggtccaatgctaatttacttaatttgtcaaagtcaacgaaatcgaatctaaaacggtacaacaactggtttagtgatgactgaagaaacgtcgttaataaaagaggatttttatgagaatgaagcgatttttaactattgtacaaattttattggttgtaattattatcatttttggttacaaaattgttcaaacatatattgaagacaagcaagaacgcgcaaattatgagaaattacaacaaaaatttcaaatgctgatgagcaaacatcaagcacatgtgagaccacaatttgaatcacttgaaaaaataaataaagacattgttggatggataaaattatcaggaacatcattgaattatccagtactacaaggtaagacaaatcacgattatttaaatttagattttgagcgagaacatcgacgtaaaggtagtatttttatggattttagaaatgaattgaagaatttaaatcataatactattttatacgggcaccatgtcggtgataatacgatgtttgatgtgttagaagattatttaaagcaatcgttttatgaaaaacacaagataattgaatttgacaataaatatggtaaatatcaattgcaagtatttagtgcatataaaactactactaaagataattacatacgtacagattttgaaaatgatcaagattatcaacaatttttagacgagacaaaacgtaaatctgtgattaattcagatgttaatgtaacggtaaaagataaaataatgactttatcaacatgcgaagatgcatatagtgaaacaacgaaaagaattgttgttgtcgcaaaaataattaaggtaagttaaacagaaaagaggataattatgaaatttatggcggaaaataggctgacgttaacaaaaggaacagcaaaagatattatagaacgattttacacgagacatgggattgaaacattagaaggctttgatggcatgtttgttacacaaactttagaacaagaagattttgatgaagtgaaaattttaacagtttggaaatcaaaggaagcttttacggattggttaaaatctgatgtctttaaagcagcacataaacatgttagaagtaaaaatgaagatgaaagtagcccgattatcaataacaaagtaattacttatgatataggctatagttacatgaaataattgaatttaaagaggttgcagtacttgttatgacaattggtatggttaacttttgtaacgaccatacatgatactgatgatggtcgttttttaatgaacacaaacatgctaacaacaaattgctaaaacgtagtttgatttgaatgtgctttgaaaataatcatcaaatatatgattttgatttattttgaagaagaaaagaattaataatgatattttggggcgtatgatttatagtagtagtatcgataaaagaaatttatacaatttgaaataatatgagtgataaaatcgattaattaatattaactatacaatcaaatgttttcatcttattaatgattaatatatttatttttaaaaataaagcgaggagctatctatggaacaaattacttctgcacaaaataatagaattaaacaagcgaacaagctaaaaaagaaacgtgagagggataaaactggattagctttaattgaaggtgtgcatttaattgaagaagcttatcaaagtgggattgtaattacacaattatttgcaattgaaccggcaagattagatcagcaaattatcgcatacgcgcaagaagtttttgaaataaacatgaaagttgctgaatctttatcaggtacagtgacaccacaagggtttttcgccatcattgagaagccacaatatgatatttctaaagcacaacaagtattgcttatcgatcgtgttcaagatcctggaaatttaggcacattaattagaactgcggatgctgctggaatggatgctgtaataatggagaagggtacgacagatccttatcaagataaagtgttgcgagcgagtcaaggtagtgttttccatttgccaattatgacactagatctcgatacgtttattactcaatttaatggtcctgtttatggtacagcacttgaaaacgcagtggcatataaagaagttacttcaattgattcttttgcattactattaggtaatgagggagaaggtgttaatcctgaattattagcacatactacacaaaatttaatcatacctatttatggtaaagctgaaagtttaaatgtagcgattgcaggtagtattttactttatcatttgaaaggttgaccgtgttgaaagttttccgatataattataattaattgtttaacagaacatttctacgtgattgcatacacaattgaatataaaccaataaaaaggcatggacatttatataaataattgttttagggagaataatcgtgactgcaagttattccaattatttaaagtcttttcacctttttggttacttaaagagatttaagtcggaaagacaatccgttatcaatattaaacaagtgtatgcttaggcataaatttgggtggtaccacggaaatgactttcgtcccttattttttaagaggatgaaagtcattttttagttaaacaacaaatatgataaatagaaaatgaatagttcgaatagggaggtcagtgacatatgtctgaacaacaaacaatgtcagagttaaaacaacaagcgcttgtagatattaatgaagcaaatgatgaacgtgcactgcaagaagttaaagtgaaatacttaggtaaaaaagggtcagttagcggactaatgaaattgatgaaggatttgccgaatgaagagaaacctgcgtttggtcaaaaagtgaatgaattgcgtcaaacaattcaaaatgaattagatgaaagacaacagatgttagttaaagaaaaattaaataagcaattggctgaagaaacaattgatgtatcattaccaggtcgtcatattgaaatcggttcaaagcatccattaacacgtacaatagaagaaattgaagacttattcttaggtttaggttatgaaattgtgaatggatatgaagttgaacaagatcattataacttcgaaatgttgaatttacctaaatcacaccctgcacgtgatatgcaagatagtttctatattacggatgaaattttattacgtacgcatacatcaccagtgcaagcacgtacgatggaatcacgtcatggtcaaggtccagttaaaattatttgccctggtaaagtgtatcgtcgtgactctgatgatgcgacacatagtcatcaatttacacaaattgaaggattagttgttgataaaaacgttaaaatgagtgatttgaaaggtactttagaattgttagctaagaaattatttggtgctgatcgtgaaattcgtttacgtccaagttacttcccattcactgaaccttctgtagaagttgatgtgtcatgttttaaatgtaaaggaaaaggttgtaatgtgtgtaaacacacaggatggattgaaattttaggtgctggaatggtacatcctaatgtattagaaatggctggttttgattcttcagagtactctggatttgcatttggtatgggaccagaccgtattgcaatgttgaaatatggtatagaagatattcgtcatttctatactaatgatgtgagatttttagatcaatttaaagcggtagaagatagaggtgacatgtaatgttgatatcaaatgaatggttgaaagaatatgtaacaatcgatgattctgtaagtaatttggcagaacgtattacgcgcactggtattgaagtggatgatttaattgactacacaaaagatatcaaaaatttagttgtcggtttcgttaagtcaaaagagaaacatcctgatgctgataaattaaatgtttgccaagttgatattggagaagacgaacctgtacaaatagtatgtggtgcaccgaacgttgatgcaggacaatatgtcattgttgctaaagtaggtggaagattgcctggtggtattaaaattaagcgtgccaaattacgcggtgaacgttcagaaggtatgatttgttcgttacaagaaattggtatttcaagtaattatataccgaaaagttttgaatcaggcatttatgtatttagtgaatcccaagttccaggaacagatgccttacaagctttatatttaaatgatcaagtaatggaatttgatttaacgccgaatcgtgcagatgctttaagtatgataggtactgcttatgaagttgcagcattatataatacaaaaatgactaagccagagacaacatcaaatgagcttgagttatctgcaaatgatgaactaactgtgacaattgaaaatgaagataaagtaccatattatagtgcacgtgttgttcacgacgtgacaattgaaccctcgccaatttggatgcaagcacgcttaataaaagcaggtatacgtcctattaataatgttgtcgacatttcaaattatgtgttattagaatacggtcaaccattgcatatgtttgatcaagatgcgattggttcacaacaaattgttgttcgtcaagctaatgaaggcgaaaaaatgacaacattagatgatacagaacgtgaattattaacgagcgatattgtcattactaatggacaaactccaattgcattagctggtgttatgggtggcgatttttcagaagttaaagaacatacatcaaatatagttattgaaggtgctatttttgattctgtttccattcgtcatacatcaagacgtttaaatttacgcagtgaatcatctagtcgttttgaaaaaggaatagctactgaatttgtagatgaagcagtcgaccgtgcatgttatttattacaaacttatgcaaacggaaaagtgctaaaagatagagtatcttcaggagaacttggtgcatttattacaccaatcgacatcactgctgataaaattaatcgcactattggatttgatttgtcacaaaatgatattgttactatttttaatcaactagggtttgatacagaaataaatgatgatgttattacagtgcaagtaccatcacgtcgtaaagatattacaattaaagaagatttaattgaagaagttgcacgtatatatggttacgacgatattccatcaacgttacctgtcttcgaaaaagttactagtggtcagctaactgatcgtcaatataaaactagaatggttaaagaagtgttagaaggtgctggattagaccaagctattacgtattcgttagtttctaaagaagatgctactgcatttgcgatgcaacagcgtcaaacaattgatttattgatgccaatgagtgaagcgcatgcgtcattacgtcaaagtttattaccacatttaatcgaagcggcatcatataatgtggcacgcaaaaataaagatgtaaaattatttgaaatcggcaatgtcttctttgctaatggtgaaggtgaactaccagatcaagttgaatatttaagtggtattttaactggagattatgtagtcaatcaatggcaaggtaagaaagaaacggttgatttctatttagcaaaaggtgtcgtggatcgagtatctgaaaagttaaaccttgaatttagttatcgtcgtgctgatattgatggattacatccaggtcgcacagctgaaatcttattagagaataaagttgttggttttattggtgaattacatccaacattagcagctgaaaatgatttaaaacggacgtatgtttttgagttgaattttgatgcattaatggctgtgtcggtaggttacattaattaccagccaactccgagattcccaggcatgtctcgtgacattgcattagaagtagatcaaaatattccagcagctgatttattatcaacgattcatgcacacggtggcaatatattaaaagacacacttgtctttgatgtatatcagggtgaacatttagaaaaaggtaaaaaatcaattgcaatacgattaaattatttagacacagaagaaacattgacagatgaacgcgtttcaaaagtacaagcggaaattgaagcagcattaattgaacaaggtgctgttattagataatgatttaaaccccatgtataaggatatctgaagtagattgatatccttaacatggggttttatttttggattcaccaattaggttccaattcatttaaaaatcaaagaggaacagcggaatacagatgatgctttgcacaactgcatataaagtcatacttatgaggaaagcaaattagtatgacttacctaataggatttcctattaggatccaatttatcttgattttaaaaatcaaagaggcacagcggaatacagttgatgcttcgcacaactgcatataaagtcatacttatgagcaaagcaaattagtatgacttacctaataggatcacctattaggttccatttcatttaaaaatcaaagaggcacagcggattacagttgatgctttgcacaactgcatataaagtcatacttatgaggaaagcaaattagtatgacttacctaatagaatcacctattaggttccatttcatttaaaaatcaaagaggcacagtggattacagttgatgcttcgcacaactgcataaaagcctctaatgattaaaaatcaaagaggctttaaaattttttgggctttttcacgatttttaaaatgcttttttgaaatggtatctaaacgtgaaataccgtatttttttataattttggcggcgattacatcgactttagcaccggcacctttaggaattgtcatattaatattttttgatatttgatccatatacgtaacaaatgcgtatctagaaattatgcttgccactgcaatggctaatgacttcgattctccttttgtttcaaattttgttttctttggaagtggtatatcggataatgcgtaatggctatacacttcgcgttttgcgaactgatcaatgacgatatagtctaattgagacgaatcaattttttcaagtacatttttgatggcttcattatgaagaacagctttcatttttacttgagtccagccttttgcttgctgaatattatatttttcattgtgtagtgttaaaagtgaatgtgggatgaaagtaaccaattgttcagcaagctctacaattttggtatcggttaatttttttgaatcatctacacccaaagtttttaaaataggaacatgctctttggtaacgaaagcagcacatacagtcaatggaccaaagtaatcgccacttccagcttcatcactaccaatacagttaaattgatcatacattaaagtttgttcaaaaaaagaattagccatatttttctttttagttttattagtattcaattgagaatgctgcggtagaagttcttcagacacagcttctgcatgattaccttgaaacatgactttacctgattggtaaatatttacagttgtattttgatactttgcacgtgctttcataccttgaggtaaattctcagtatcaaaagaaatgcgtgacattaatgtcgttatgtctttatccgacaatttaaaaacgatattcgccatttgtgtaaatcctttcatataatttcattatcattagcaaaaataatcatatcataaatgataataacgtcagaaacatttatatatgttgtaaagaattaattgcggatacttacaaaatacatagtggtcatgtataatgtttatgaaaatgttatagtgacacaatttaaacatgataaagtattgaatagaaaattctttacattatttcatttcattataaaaagaacattaagtcatctatagagattgtgttgttgttttatcataattgcaatataacaatattagtatcaaattcagacaaactatccagtcatattttataacgtgaatttagattttaaaaaaaggatcaggagaaattataaatggcacagtttaaaaacaaggtaaatgtatcaattaatgatcagctttttacaattgttggggaagataacccagagcacatacgatatgtagcacatttagttgatggtaaaataaaagaattagggtataaagcagcaggtttagatacttcaagaaaagcaatactaactgctgtgaatattatgcatgaaaaagtactactagaagaagaaaatcgacgtttgaaacaacaaattcacaaattgcagcagcgtgagcaataaatggtcattgattttatcataatcattttctttgtgtattttatcatcgttggattcagacgaggtttttggttatctatgatacatttgagtgcaacgattgtatcattgtggattgccagtcaattttacaaatctatcgtagaaagattaattgtatttattccatatcctaaaacaacagcatttaatacaacttttgcgtttcattttaatcatctacaaaatcgatttgaagcgattgtagcttttttaatgattacattgttttgtaagttcattttatatctaattatcgtaacttttgataaaataatagcgtatcaaaacattcatattttcagtcgtgcaatgggaatgatagttggtgtgtttatgacgataattgtcttacactttacgttatatctattggcattatatcctaacgaagcattacaacatcagcttaaaatatctattgtgagtcattcattgatttttcacatcccatatttatcggctttcaccattaatttataaattatcataagaggtcaggacaaaggtatatattaatgatacgtcctggtcttctttttatggagtgttattatgacaaaaaaagatgttatcaaactattagaacaaattgctacttatatggaattaaaaggggaaaatacttttaaaatatcagcgtatcgaaaagcagctcaaagtcttgaattagatgaacgaccattagatgaaatatctgatgtaacggagttaaaaggcattggtaaaggtgttgcagaagtaatcaatgattaccgtgagaccggtgaatctcagtatttacagcaattacaggaagaagttccagaaggtcttattccacttttgaaaattcaaggacttggaagcaagaaaattgctaagctatataaagagttgaatattgttgataaagcttcacttcaagttgcttgtgaaaatggaaaagttagtgaattaagcggatttgctaagaaaacggaacaaaacatattagaagctgtgaaacaacttggtgctaagaaagatagatatccaattgatcaaatgagaagacttaatcaagaaatcattgattatatagatacattaaattatatcgatcaatattcatctgcaggaagcttccgtcgttttaaagaaatgagcaaagatttagatttcataataagtaccgataacccaaaagcagtgcagcagcaattattaaatattcccaataaagtaaaagaagttgcagtggggaacacaaaagtttcattagaattagcgtatgatgatgaaacgattggtgtcgattttcgattaattgaaccaagtgctttttatcatacattgcagcattttactgggtcaaaagaacataatataagaattcgacaacttgctaaagcacgtgatgaaaaagtaagtgaatatggaattgaacaagctgatggtacattaattcaatatgatagtgaagccaaaatatatgaacattttaatgtgaattttataccacctgctatgcgagaagatggtagcgaatttgataaagatctaagtaatatcattacattagatgatattaatggagatattcatatgcatacaacgtatagtgatggtgcgttttccattcgagacatggtagaagcaaatatcgcaaaaggttataaattcatggtaattactgatcattcacaaagtttacgtgttgctaatggcttacaagtagaaagacttttaagacaaaacgaagaaattaaagctttagataaagaatatagtgaaattgatatttattcaggtacagaaatggatatattacctgatggctcgctggattatgatgatgaaattttagcacaacttgattatgtaattggagctattcatcaaagctttaaccaatcagaagaacaaattatggaacgattagctaatgcatgtcgcaatccatacgtgcgacatatagcgcatccaacagggcgtattataggtagaagagatggttataaaccgaatattgaacaattaatggcattatctgaagaaacgaatacagtattagaaattaatgccaatccacatcgactggatctgaacgctgatatcgttcgtaaatatccaaatgtgaaattaactattaacactgatgcgcatcatacaaatcatttagattttatgaattatggcgtagcaactgcgcaaaaaggatttgtaacaaaagatagagtgattaacgcattatcgcgtgaagctttcaaagactttattgaaaataatataaaacttaagaaatagagggattttatgagacaaaaaacattagacgtcttagaatttgaaaaaataaaatcactcgttgccaatgaaactattagtgacttaggcttggaaaaggtcaatcaaatgatgccagctactaattttgaaacggttgtttttcaaatggaagaaacggatgagattgctcaaatctataataagcatcgtttaccaagcttgagtggcttatctaaagtatcagcattcattcatcgcgctgatattggcggcgttttaaatgtatcagagcttaacttgataaaaagattaattcaagtacaaaatcaatttaagacattttataatcaattggttgaagaagatgaagatgttaaatacccaatattagatgacaagatgaatcaattacctgtgttaaccgatctttttcaacaaataaatgaaacatgcgatacgtatgatttatatgataatgcgagttatgaattgcaagggattagaagtaaaatttctagcacgaatcaacgtattagacaaaatttggaccgtattgttaaaagccaagcaaatcagaaaaaattatcagatgctattgtaacagttaggaatgaaagaaacgttatacctgtcaaagctgaatatcgacaagattttaatgggattgtacatgatcaatctgcttcaggacaaacattgtatattgagccatcatcagttgttgaaatgaataatcaaattagtcgattacgtcatgatgaagcaattgaaaaagaacgcattttaacgcaactaactggttatgtggctgcggacaaagatgcactacttgtggcagaacaagtcatgggtcagttagattttttaatcgcaaaagcgagatatagtagaagtattaaaggaacaaagccgatatttaaagaggaacgtactgtatatttacctaaagcataccatccattattaaatcgtgagactgttgtagctaataccatcgaatttatggaagatattgaaacggtaattattacaggaccgaatacaggtggtaaaacagtaacattaaaaacattaggtttaattattgttatggctcaatctggattgttgattccaacacttgatggtagtcagttaagtgtatttaaaaatgtatattgcgatatcggagatgaacaatcaatagaacaatcattatcaactttttcatctcatatgacgaatatagttgaaattttaaagcatgcagataaacatagtttagttttatttgatgaattaggtgcaggtacagatccaagtgaaggtgctgccttagcaatgagcattttagatcatgttagaaaaattggttctctagtaatggcaacgacgcactatcctgaacttaaagcatatagttataatcgagaaggcgttatgaatgcgagtgtagaatttgatgtagatactttgagtccaacgtataagttattaatgggtgtgccgggtcgttcaaatgcttttgatatttctaaaaagttaggtcttagtttgaatattataaataaggctaagacgatgattggtactgatgaaaaagaaataaatgaaatgattgaatcattagagcgtaattacaaacgtgtagagacacagaggttagaactggaccgtcttgtaaaagaagcggagcaagtgcatgatgatttatctaagcagtatcaacaattccaaaattatgaaaagtctctaatagaggaagcgaaagaaaaagcaaatcagaagattaaagctgcaacaaaagaagctgacgatattattaaagatttaagacaattgcgtgaacaaaaaggtgcagatgttaaagaacatgaattgattgataagaagaaacgattagatgatcattatgaagcgaaatctataaagcaaaatgtacaaaagcaaaaatacgataaaattgttgctggtgatgaagtaaaagtattatcttacggtcaaaagggtgaagttttagaaattgtcaatgatgaagaagcaattgttcaaatgggaattattaaaatgaagttacctattgaagatttagagaaaaaacaaaaagaaaaagttaagccaacgaaaatggttacacgtcaaaatcgtcaaacaattaaaactgaacttgacttacgaggctaccgttatgaggatgctttaattgaactagatcaatatttagatcaagccgttttaagtaattacgaacaagtttatatcattcatggtaaaggtacaggtgcacttcaaaaaggtgtacaacaacatttgaaaaagcataaaagtgttagtgactttagaggtggtatgccaagcgaaggtggatttggcgttaccgttgcaacactaaaataaattataatttgataaattaaatagctgcagttaaaataatgtaaagcaacaagaatacatttcaaacatgttatttgaaataagcataaaaattgagcaaatagaaatacatgaagcatgttatctgatataatttgaacatcataataataattaaggaggattggcatttatggcaatcgtaaaagtaacagatgcagattttgattcaaaagtagaatctggtgtacaattagtagatttttgggcaacatggtgtggtccatgtaaaatgatcgctccagtattagaagaattagcagctgactatgaaggtaaagctgacattttaaaattagatgttgatgaaaatccatcaactgcagctaaatatgaagtgatgagtattccaacattaatcgtctttaaagacggtcaaccagttgataaagttgttggtttccaaccaaaagaaaacttagctgaagttttagataaacatttataagttacaaccaatgacgactggggcatttctttaatgaattgctccagtttttgtttgtgtttttaatataaaaagttgaatgataagtcatcatattgtttacgacttgagaatggtgggattaataaatctatgaacgttaaatgataatcaaacatgctaatagacatgtagcagttggtttgataaaacaatgttcaatattacatgatgtgcatgaaaagtcatactcgaagatgttgattatgaactagaattagtggtgataaatttgaagcacttttgtagcatcattcattttaaaattagaaggggggatatttttggaagactataagcaacgaattaaaaataaattaaatgtcgtacctatggaaccaggctgctatttaatgaaagatcgtaatgatcaagtgatatatgttggcaaagctaaaaagctaagaaatcgattgcgatcatattttacgggcgctcatgatgctaaaacaacgagactggttggtgaaatacgtcgctttgagtttattgtcacgtctagtgaaacagagtcacttttactggaattgaatctgattaaacaatatcaacctagatacaacattttattaaaagatgataaaagttatccatttattaaaattacgaaggaaaaatatcctagactactagtgacgagaactgtaaaacaaggtactggcaaatatttcggaccgtatccaaatgcatattctgctcaagaaactaaaaagttattagacagaatatatccatatcgcaaatgtgataagatgccagataaattatgtctttattaccatattggacaatgtttaggaccatgtgtatataacgttgatttgagtaaatacgcacaaatgacgaaggaaattactgattttctgaatggggaagacaaaacaattttaaaaagtttagaagagcgaatgttaactgcaagtgaatcacttgattttgaacgagctaaagaatatagagatttaattcaacatattcaaaatctaactaacaaacaaaaaattatgtcatcagataaaacgattcgtgatgtctttggttatagtgttgataaaggatggatgtgtatccaagttttctttatacgacaaggtaatatgataaagcgagatacaacgatgattccattacagcaaacagaagaagaagaattttatacatttattggacaattttatagtttaaaccaacatattttacctaaggaagttcatgtaccacgtaatttggataaagaaatgattcaatctgttgtggacactaaaatcgttcaacccgcgcgaggtcccaaaaaagatatggttgacctagctgcacataacgctaaagtatccttaaataataaatttgaattaatatcacgtgatgagtccagaacaattaaagctattgaagaacttggaacacaaatgggaattcaaacaccaattagaattgaagcattcgataattctaatatccaaggtgtggatccagtgtcagcaatggttacatttgtcgatggtaaaccagacaagaaaaattatagaaagtataaaatcaaaacggttaaaggtccagatgattacaaatcaatgagagaagtagtaagacgacgatattctcgcgttttaaacgaaggattaccattaccggatttaattatagtagatggtggtaaaggacatatgaacggggttattgatgtgctacaaaacgaattaggtcttgatatccctgttgcaggtttgcaaaaaaatgataaacaccaaacatctgaattattatatggcgctagtgcagaaattgtaccactgaagaaaaatagccaagcattttatttgttgcaccgtatccaagatgaggttcacagattcgcaatcacctttcatagacaaacacgtcaaaagacaggcttgaaatcaatccttgatgatatagatggtatcggtggcaaacgtaaaacattattattgcgtacattcggttcaatcaagaaaatgaaggaagctacacttgaagattttaaaaatataggtattcctgaaaacgttgcaaagaacctacatgaacaattgcataaataaattacagggcgtgagaatcattctcatgccccaaaatatatgaaataatgttacaatatggttaacaaagttatttttttgaatgtacgtggaagcgttttctaaatgagaaagtttatcatcacaagcaatcttaaatattaaatccaaattttacattgttcgacatgcagtttggtgatcgtgcagtgtgtatttgtctttaaaatgtttcgcttaatgataatgacaacgcaagaaacgatatcactttagggggttaagcgtacgtttaatataaatagctcaataaattaaatattcgttcacaggggggactccttttggctcaatcaaaaaatgaattttatctaagacgtattcactcgttattaggtattatcccaataggtgcatttttggtcgttcatttattagtgaatcaccaagcaacacaaggtgctgaagcgtttaataaggcatctaactttatggaatcattaccatttctaattattgtagaatttttatttatatacattccgttgttatatcacggtttgtttggtatacacattgcatttacagcaaaagaaaatgttggacattactcgatttttagaaactggatgttcttattccaaagagtgagtggtatcttaacatttatctttattggtatccatttatggcaaacacgtttacaaaaagcattttacggtaaagaagtgaattacgatttaatgcacgaaacattgcaacatcctggatgggcaatattttatattatttgtattattgctgttgtgttccactttgcaaatggcttatggtcattcttagttacttggggtggacttcaatctccaaaatcacaacgagtatttacatgggtttcattaatcgtattcttagttatttcgtatattggtgttactgcaattattgcctttatgtaatacatcgcatttaacaaatatagattgaaaatttaggggagtgaaatttttatggcagagaaacatcttattgttgtcggaggtggcctagcgggcttaatgtcaacaattaaagcggcagaaaaaggtgcacatgtagatttgttctcagttgtaccagtaaagcgttcgcactctgtttgtgcccaaggtggcattaatggtgcggtcaatactaaaggggaaggcgattctccttggattcactttgatgatacagtgtatggtggcgacttccttgcaaaccaaccacctgttaaagcgatgacagaggcagcacctaaaattattcatttattagaccgtatgggcgtaatgttcaatagaacaaatgaaggtctattagattttagacgtttcggtggtacattacaccacagaacagcatatgcaggggcaacaactggacaacaattattatatgcattggatgaacaagttcgtgcatatgaagtagatggattagttacgaagtatgaaggatgggaattccttggcatagttaaaggtgacgatgatagtgcaagaggtatcgttgcacaaaatatgacaactgctgagattgaaacatttggttcagatgcagttattatggcaacgggtggccctggtatcatcttcggtaaaacaacaaactcaatgattaatacaggatcagcggcttccattgtttaccaacaaggcgctatttatgctaatggtgagttcattcaaattcatcctactgcaatccctggtgatgataaactgcgactaatgagtgaatcagcacgtggtgaaggtggacgaatttggacatataaagatggtaagccttggtacttcttagaagagaaatatcctgattatggtaacttagtacctcgtgatatcgcgacgcgtgaaattttcgatgtatgtattaaccaaaaattaggtattaatggcgaaaacatggtatatcttgatttgtcacataaagatccacatgagttagatgtaaaactaggtggtatcattgaaatttatgaaaaattcactggtgatgacccacgcaaagtaccaatgaagattttcccagctgtccactattcaatgggtggtctatatgtagattatgatcaaatgacaaatattaaagggttatttgcagctggagaatgtgacttctctcaacatggtggtaaccgcttaggtgccaattcattgttatcagcgatttatggtggtacagtagcaggtccaaacgcgattgagtatatttcaaatattgatcgatcatatactgatatggacgaaagtatttttgaaaaacgtaaagctgaagagcaagaacgttttgataaattattagctatgcgcggtacagaaaatgcatataaattacaccgtgaacttggtgaaattatgacagcaaatgtaactgttgttcgtgaaaatgaaaaactgttagaaacagataaaaagattgttgaattgatgaaacgttatgaagatattgatatggaagatactcaaacttggagtaaccaagcggtattctttactcgtcaattatggaacatgttagtacttgcacgtgttattacgattggtgcatataaccgtaacgaatcacgcggggcccattataaaccagaattcccagagcgtaatgatgaagagtggttaaaaacgacaatggcctcattccaaggcgcatttgaaaaaccacagtttacttatgatgacgtcgatgtgagtttaataccacctcgtaaacgtgattacacaagtaagtctaaagggggtaaaaaataatgactgaacaatcagtgaaaaacactccacaacatgaaacacaatctaaaccgaaacaaaaaacagtaaaattaattattaaacgacaagatacaagtgattctaagccttatgaagaaacatttgaaattccatatcgtgaaaatttaaacgtcattgcttgtttaatggaaattagacgtaacccagttaatattaaaggtaaaaaaacaacacctgttgtctgggatatgaactgcttagaagaagtatgtggagcatgttctatggttatcaatggtcgtgcaagacaatcttgttctgcgattgttgatcaattagaacaacctattcgtttagagccaatgaatactttcccagttatccgtgacttacaagttgatcgttctagaatgttcgataacttaaaacgtatgaaagcatggatcccaatcgatggaacgtatgatttaggtccgggaccacgtatgccagagaaaaaacgtcaaacagcttatgaattatctaaatgtatgacatgtggtgtatgtttagaagtttgtcctaatgttactgaaaataataaatttgttggtgcgcaagcaatctcgcaagttcgtttgtttaatttgcatccaacaggatctatgactaaagatgaacgtttaaatgcattaatgggtactggtggcttacagcagtgtggtaattcacaaaactgtgttaatgcttgccctaaaggtattccattaacaacatccatcgcagcaatgaacagagaaacgacattccacatgtttaaatcattctttggttcagaccatgaagtagaataaaaattaatcccttttgagttaaaatgttatgttcctttcaaaattaaattgaatggagatacacaaaaacttagaagggattttttatagttacattacatgacaatatgatagtgagctaatttaaaacaagtattatattataatgacaaaaatggtaaacacagtgcataatactaaaatccaatgcttagttatgataaactaaaaattaaattaaaagtaaggatgaccgaatatgaataaaccaataggtgtaatagactctggtgtcggaggtttgacagtagctaaagaaattatgcgtcagttgccaaatgagacgatttattacttaggtgatattgggcgatgtccatatgggccaagaccaggagaacaagtaaaacaatatacagttgaaatcgctcgtaaattaatggaatttgatataaaaatgctcgtgattgcttgtaatacagcaactgctgtagctttagaatatttacaaaagaccttatcaatcccagtgattggcgtaattgaaccaggtgctagaacagcaataatgaccactagaaatcaaaatgtattagtactaggaacggaaggcacaattaaatctgaagcatatcgtacgcatattaaacgtataaatccacatgtagaggtacatggcgttgcctgtccaggttttgtgccacttgtagaacaaatgagatatagtgatccaacaattacaagcattgtcattcatcaaacactgaaacgttggcgtaatagtgagtctgatactgtcattttaggatgtactcactatccattgctctataaacctatctatgattattttggtggtaaaaagactgtgatttcgtctggattagaaacggctcgtgaagttagtgcattgctaacatttagtaatgaacatgcaagttatactgaacatccagatcatcgattttttgcaacaggtgatcctactcacattactaacattatcaaagagtggttaaatttatctgtcaatgtggaacgtatatcagtgaatgactaggaggatttttaatgaaagagattgttattgcatcgaataatcaagggaaaataaatgactttaaagtgatatttccagattaccacgtaataggtatttcagaactaataccagattttgatgtggaagaaacaggatcaacatttgaagaaaatgctatattaaaatcagaagctgctgcaaaagcattgaataaaacggtcatagctgatgacagtggactagaagtttttgcattaaatggtgagccaggtatatactctgcacgttatgctggtgaaaataaaagcgatgaagcaaatattgaaaaattattaaataagcttggtaatacaactgatcgtcgtgcgcaatttgtttgtgtcataagtatgagtggccctgatatggaaacaaaagtatttaaaggtactatttcaggtgaaattgcagatgggaaatatggcgaaaatggtttcggatatgatccgatattttatgtaccgaaattagataaaactatggctcaactttctaaagaacaaaaagggcaaattagtcatagacgaaatgcgattaatttacttcaagcttttcttgaaggtgataaaaatgtctaaatggattattgtgagtgataaccatactgagtcaggcgttttatatcaaatttatgaaatgcacccagatgcagatgtatatttacatttaggagattcagaattcgcgtatgatgatacggaacttagcttatttaatagagtaaaaggcaattgtgatttttacccagaatttgaaaatgaagcggtcgcaaaatgtaatgacgtgaaagcattttacactcatggacatttatatcaagtcaatcgaacaagagatttattagctgaaaaaggacttgaattaggttgtttgtttgcattttatggacatacacatgtggcaaaatatgagtatattaatggtgttcatgttattaatcctggaagtatatctcaatctagaagttcaatggaagaaacatatgctgaagttattattgatgatcaaactttacatggcaccatcaatttcaaaaatcgacatcacgaaacaataagtcatactactttttaaatagaaagtagctatggctttttttagtttatagattgatttaactaggaggtcgtgacatgaatgtttatttaaaagtatttctgacaattttataagataactggaatgaataacacatttatgttatgaaaagaattgtaattttggggaatgtgattgttgatggtcctatatggttgaatcatgttgattatttggttaaaagtgtattgttaaaaagtataaaattaagattccaagaagtcaggaattttgaaattttagttaaaatcatgaatcgtatacatatttaaaaggatttctaaaggcataaattatatcaataatttgatgtttaaaatatggagtagcaaaattcttgaaattcagaaatgtagtgacacaaatattaatgtttagttaataaatagttaatgtagttttttgtatctgtctattattataaatatatacaaaataaatatttgaggataggtgttattaattatgaaaaagaattttattgggaaatcaattttaagcatagctgctattagtttaacggtatcaacgtttgccagtgaatctcatgcacaaactaaaaacgctgaaactgtaaaaaaatataacgagtatcaaacaaactttaaaaaacaagtaaataaaaaagttgtggatgcacaaaaagctgtaaacttgttcaaacgtactagaactgttgcaacacaccgtaaagcacaaagagctgttaacttaattcatttccaacacagctatgaaaagaaaaaattacaaagacaaattgatctagttttaaaatataatactttaaaataattgatagaagccatgctatagagtgtggctttttgctatattcaaaggtataattaatttataatattgcgttcatttgaatggtgagcttattgggataaatcatataaataattacttaaaagtgaatacaatagttgtttatgttttgaacaagcgaggtggctattgtgaaaaggaaatcgaatgtattaacaatcataaaaattgtaacggatctagtggcaaccgtgttaatcatacgtgctttattaaacagtcgtaaagatgctaaataaattggaagttatttaaaataaaaaagcacgccaaaacgttagcattgttttctaacgtttggcgtacaactatttaattcagtatgttaattaatcccaataaatcgagtcgatttcaccgtttttaacaactttaatattttttctgttctcttctaaaggacgagttaagtcaaaagtatagtaatctctaggaccaccatctttaattctgacaactgctttcttcacatcaccttggcttaattttttaacaataaggtacagatcattaacagtttcacctttgtaatagtcttgaggtggtatattaattaatttattagcacgatcttcatcttttttggcttggtcagcttcttttttagcgatttctaaacctttccattcataactaaaagcatttgcactttgtgctgttgttaaaagacctgcagcgattactgtagatgcgataatagtttttgtgatatttttttcataataagttctccctgtaaaataaatttgtacttactaatgcgagtacactgctattttacaaacggtttcatgcatttaccagttaacacttcattaattaaaattaagtgcaaattaataaggtttaatgcaatcgaaaaagaataatgatgaatttgatggtattatttttatttgaggtattattgaaattgttgatagtataataatagtagtaaacgtcactcaactatgattgaatgatttttattgttaaaacgatatttgtatttctctacattttgtttgcaatattgggtagacaaacactccaaattgttatccatatagttttttgataattaatgtttataaaaaaagaaatgacacatagtagagaagtaattaatatgtataattttacttataaagaaataagagatatattctaattatggttgatatgttatgattaatatataagttaaaaattatactatttagttgaattatgcattttcgaagtaagaataattcaacacttacatttttaaatagataaaatagtgtaaaatcacgtgccaagattactatagagtaggcattgagtattattggcaatcacttaagtgattgttattttttcgtggtcaataataaagatataaataaatatattgaggtcaaacgatgataattaaaattttaacaattctattactactttgtatattgagctatttggttacaaatagaaagaagccttttctgttcttaaagacactctttatgggtgtggtatttatctttataggatatatttcactggcaatatctgccgtaattatttatggtattattcaatttatcacaattgattttggtagttttttcttaatgggtattatattgatcttgatttcaagtatattccaattatttatagttagattactttttagaaaaaagaatgtcgatttgacagaggttgtcgttttagaacatttaattcaatggttcttagtttactttgcgatctatcaagcagtaaatgaaaaaatggacattaatgatattaatatcgacaatttccaatctgtcttttttgacgtgtctaatttgaatttagtaattctaccaacgttaatcattagctgggtcacaatatttaactatagaatgagaagttacaaataaaatctatgaaattataccatcagacaccaacatttaaatggtgtcttttttgttgtgtggttttatttttgaaattcgaaaaagtagaggcgtgaattttttgactagtgtataagtgctgatgagtcacaagatagataactatattttgtctatattataaagtgtttatagttaattaataattagttaatttcaaaagttgtataaataggataacttaataaatgtaagataataatttggaggataattaacatgaaaaataaattgatagcaaaatctttattaacaatagcggcaattggtatcactacaactacaattgcgtcaacagcagatgcgagcgaagggtacggtccaagagaaaagaaaccagtgagtattaatcacaatatcgtagagtacaatgatggtacttttaaatatcaatctagaccaaaatttaactcaacaccaaaatatattaaattcaaacatgactataatattttagaatttaacgatggtacattcgaatatggtgcacgtccacaatttaataaaccagcagcgaaaactgatgcaactattaaaaaagaacaaaaattgattcaagctcaaaatcttgtgagagaatttgaaaaaacacatactgtcagtgcacacagaaaagcacaaaaggcagtcaacttagtttcgtttgaatacaaagttaagaaaatggtcttacaagagcgaattgataatgtattaaaacaaggattagtaaaataaaacttcaatcgttgctgttatgtggaaataaataattaaatgttatgttaatttttattaatgaaaaaagtaatctatttaatgacaggttaatgtaattgtcctgaaattgactatatactcagtaagtatcaattttaaggagagtttacaatgaaatttaaaaaatatatattaacaggaacattagcattacttttatcatcaactgcgatagcaactatagaagggaataaagcagatgcaagtagtaagaaagactatataattcaaagtgagtttcatgataaacgcatagcagaagaattaagaactttacttaacaaatcgaatgtatatgcattagctgcaggcagcttaaatccatattataaacgtacgattatgatgaatgaatatagagctaaagcggcacttaggagcaataacttcgctaaaatggctgatgctaaagttgcattagaaaaaatatacaaagaaattaatgaaattataaatagataataaataaaacaggttgagacaaaaaatggtcttaacctgttttcaattagcaaatgtgataaattctatatcaaattacttatgtataatgaatgacatttaaaagtaggggagactaatataaatacaatagttcctagggttactctcaaaataactatatcaattatttactttgctctcctattttttaaatttgtacatgtttaaacaatcaaaagtgtacattattaaattatcagttctagttctagtggtatattggtagtagttgactaaatgaaaatacgcatgtaacaagttttttcaatactcgtggggccccaacacagagaatttcgaaaagaaattctacaaacaatgaaagttggggtgggccccaacagagagaaattggatcaccaatttcaacagacaatgaaagttggcggggccccaacagagagaaattggatcaccaatttcaacagacaatgaaagttggggtgggaccctaaacaaaaaagctgacggaaagtcagcttacaaaaatgtgcaagttggggaaacgggccccaaacataaagaaatactttttctttagaaattagtatttcttatgaatgagttttactcatgtattcattttttaagtacacattagctacagcaaatgataaagaaccactacataataaatcattagtggttctttatcatttctatctcactcttttactggaagaaaaagtttacgtttgtagaacatgccacaataccaaaaataattaagaaaaataagacgataagcatgatgacacttttcaaacaacctctatcagtttctttcgattttctttgttgaacctttttataatcttcaagtagttttgtcgcttttttatttatatgtttattcatgatgttgactccttataatatatgtttaattcattaaaatagttgaaaacatgacttgaaataaagatataaagctaaagtaaggatgttcaattgtttcatattttatgaaagtataacgttaaatatgttaatttgatgatgatatttgctttttattttccaaatggaatttccttaaactgatgcattaaaatattaatgaagcactagaatacataaatgaatagtaatggtgcacagtatagaataattaaggctatattaagtataaatatcgttaactgtaagctatctttagttttaatataaactattaggataatcgacgtaagaagaatcatatatattaatgatgaagaagtccatacaaaatccgcatcatttgttgttaataatgggactataattaatccgaaattaatcatgcatgctatatatactataatgttatacacaatgttaatttttgttcaccaccttatacttctattttaaaaacttctttataatgatatattgtttaaagttgaaataattagattatctaattttcatttactttacatgtaaaaggctatatatagtatgctctttatgattctaaatgctttttaatatttaatgctcatcaacatttggattttgaatattcaattcaaaaactttattagctacgtcaattgtaaaatcagaaccatagttgacatgagctacttttaattttccatctaaataatagattgcgattgcaacatcgtaaaattcgtcaatgacaaataaactcttttcgtttgctacaacctcatgctctcctgagtatacaacgttaatttcccaatcattaaaagccatttgttaacctccttgaacatttaaattgattcaacttaagtttaacttattcatacaacttcgtacaatatctagatgaaaattaattgtatttctagaaatctttttcaattatatgtactaattatacttttaaatttcttatttcagtatagttttaaaacgattttaaaataattctgcaaatatattaacacataatgtgttcaaaaagttttgaacaatttcaaaacttttatataaagggtttgacaacatggaattcaaatatcttattttaaaaatcacctcatatagcgtcatgtttagtctaacttttaagtcaggaaagcaaatcaagtagatagtttaaattaaaaatatcataagttaattaaactaaattcagtataaaaattagccgaaaaacatcatttctgaagttatcggctaaagttataaattatatttatttgtacatgaacaaataatttacattaatttgtcatttcttctttttcccaatcgattttatatctttctgaagaacgatctgtccatttatctttagtattggtacctttccaatttgttgaagtccaatgcaattggtagtcatcacgaactcgttcgtatattacatctatatttgtttgttgtttggatgcttttctatccatagtaataactgtagcgaagtctggtgaaaaacctgaagataatagagaacttgctttgttaggatcaaggaagttatctgctgctttcatagagccatttctagttttcatgaaaagttgattgccatataccgggttccaagaatctctatcatatggtccccaattttgattcaccatattgttaaatatcactttccagcctacttttttatcagttgggctctctaaaattgttttgaaatccggttgaacatatttgagtgtatgaccaatcgaaacatttgcaccaataaggccaccaatttttcctgtatcatcaccagtaacattaccgttgaatccataagttaaagtactcatatactcttttgtatcaatcgaatttcttggatagtaatcagatatttgagctacttcattatcaggtagttgcaactgtaccttaaaggctgaaggccaggctaaaccacttttgttagcaccttcttcgctataaactctatattgaccagcaatggtacctttcgttctaataactagcagttttttattgtgatttttatcatcgataaaactataaaatacttttttgtgcatgccattttctttatcataagtgactaaatcacctgtttttactgtagtattgcttccaatatctgtagtaccggttttaatattaatatcagaatctgcggcattagcgacaggattcattaatatggaacctagcaataatgttgttgttactgagctgactatacgtgttttcattttcatcatccttctattttttaaaacgatttgaggaaacaataatcaatatgtcaatttagaatattgcagttgagacatatcaaatatttataatcgtttatattagtatatttaatgtagcaactgataaattactgagtgatgatgagtgattattttaagaatatgtttttaacttttatttaaaatttgaaaggaagcatttcaatttcgagggttagtcaaagttgaataaattctttatgaaacaaggaaaagacatagctaattttattgattaatttctttaaaactaatgatttgtttgatttaaaaatgtaatcgattacaatataaaaatacaaatatcttagaattaaatcaattaattaactattaaataaaaattaactatatattaactactgtaaattaataaatagaaatagagaaaaagggtattaatcatgtttggaatttcgtcgggaataaattttgccgatacatagaaatatctaatagataacgaaaaagtatcgtatgtatttttaatatagtgtaaaatattatatgtaaaataaaatgtaggtttttagttagaggcgttataaggaaattttgagtataggttagcttttaattatgaatcttattgaaatttgattaataaaaatatgataggggattaaaatgaaactattttatatcgtattacttattattatatggctgaatatatttttaggaaatgaaatcatccatacactgactgttttaataacaacattgtatattgttaattcaagaaaggggattaaaaatgacagagttgaataatattataaactctcttcaatctttgtttgagtctgaatcaggctataaaatttcgaaaaattcaggagttccatatcaaacagtacaagatttaagaaatgggaaaaccaaactagaagatgctagatttagaacgattattaaactttatagttactatgtctcattaaaagaacactaatcatgggacaataaagtattgctaaaataattgaatcattaaatgaaggaatagagcctaagacataataaatcaatgtcttaggctctacaatattatattggtagtagttgaccgaatgaaaatgcccatgtaacaagcatttttcaattataggcggggccccaacatagagaatttcaaaaagaaattctacagacaatgcaagttggggtgggccccaacatagaagctgacgaaaaatcagcttacaataatgtgcaagttggcggggccccaacatagaagctggcagaaagtcagcttacaataacgtgcaagttggcgatgggccccaacatagaagctggcgaaaagtcagcgtacaataatgtgcaagttggggagtgacaacgaaataaattttataaaatatcatttctgtcacattccttctcccaattccatttaaatatatagaaaatttcacctattgtatacatcatacactttgaaaattatcatttaaataatctgatttggaattaaagtgcatgaagtataagtcaccttcatatactaatcaaagaggacgtcaacagttattttattaggatttttaacataaacatttgctagatctgaatgtaatcttttgcttaaatcaatagtgaagttattaccgccaccggtgatcttaagcttacctttattacgattttcgttatataatattttattttttattaacgcttctcgtgcacggaaatcgatttctttcaatgttaatactggtttattgccttggtatattttatgtgcaccaataatcgtttgtagtttatctttgtattgcacaaaaagattataagttttatcagaaggttttgcggctggtgtaacaccacctgtaaatgtctctctataagaccaccataactgatcagtatctttgtcttttagtccaaatacatctacgtaacgatcttttaactgattaatatttccccaactttcagcgccccataaagaaatatgtgctgaccatgaatatctcttaagttcaacataaatgtttccattatcatattgatatagccatttatttgaaaatgaaaaatgaggctgtgtgtaatatttaattaattcattgatgttagtttcatcttgaccaatgctataagctttagcttcagagtaaaaactaaatactggtttttgattttggggtaatactgtacctaatagtaataatgttgtcgttaaaattatatttttcgtgatgttcttattcattagaacatctcctttcagaggaatcatgatacgaggaataacaaatttatatttgagcgaagtcaatttagcatttgcgattatttttattaactccgtttttattgttagtttgatttttcgaggataacttcaatttttgcattttgaggttttttaacatatctatttgcatcagttgatggcaaccttttacttaaatctattgtgtagttattgtctgcacctgttattttaatttgtcctttgttataagaattattatataattttttacttttaattaatgtttgacgaatacgaaaatctaattcttttaaagttaaaacaggcttattaccttcataaactggaaatccgccagtaaacgtttctgctttatctttatatgttacattcagtttatagtgtttatcgttaggtgttgctgcaggagtaacaccaccagtaaacgtttcttgagataatgcaaaagaatcaatggtttcttggtcttttataccaaaaatatcaacgcttttatttcttaattggttgatattgccccaactttcaggtccataaacttgaatatgactataccaagaaaactgtaacaacgttgcatgaatcgtaccgttatctttttgccataacgttttgttagagaaggttaaatgtttttgcgagtaatatttagttaactcattaacgttagtttcattttgatttatataataagctttcgcttcagttgaagaactgataggtgtattaggaaattgtgttgatgctgtacctaatagtaacaatgttgttgataaaataatttttttcgtgatgttattgttcattcgaatttctcctttgagtattgttggaatgtttaattataaaagggggggttaattagataattgaaattatccgcattttcaaaaggtaataggttagttagatttttcgagtatgacttcaatttgtgcatttttaggatttttaacataacggtttgtatcagttaattttaattttttacttaaatcaatcgtgtaattatttccatcagcagttatcttaatttgacctttattaaattcttcgttatataactttttattctttattaatgtttgacgaatacggaaatctaattcttttaaagttaatactggtttatttcctttgtaaaattcatgtccaccgatgatagtttgttgtttatcactatattttaaaaatagtctataaggcttatcagatgaagtagctgctggcgtaacaccaccagtaaatgtttcatcataagtccagtaaccttcaactgtgtcctcatctttagttccaaatatatcaacgtatttatttctcaactgattaatgtttccccaactctcggaaccaaacacttgaatatgactataccaaacccacgtttgcaatgttgcatgaatgctaccattgggcttttgccataaccattttccagataatgaaaaatgcggctgagtgtaatatttgattagttcattgatattagtctcgttttcactgatattataggcttttgcttcagatgaaaaactgattggtgttttaggaagttgtgttgatgtggttcctaaaagtaacaatgctgttgataaaactaatttattcatgatgttctttttcatatgaaaatctcctttgcgtgaattacccaaagtatataagctattacaccgattcggaattaaataaaagctaaaactatgttaaataaacttaaacagttagtagtgttatttaagcaaaacttatcatttttaagttttggacagaaacagtacctaataaagtaggatggagttatatattaaaaacgacacattagaattattctctaatcaattgcattaaattgtttgataattgaattttctaactacttgaaaaatagttatactttaaatgtagtacttattttaataatttcctactacttaaatttaatattaataaaatgttcatttaattattgataaaatattacaaattttaatagtaggttgtgtttattttgtatgcgcttacaatttaggtgtaactaaaataaaaggagttgttattaatgaaaaatttacgaaacagaagttttttaactttattagacttttcaagacaagaggtagaattcttattaacactctccgaggatttaaaacgtgctaaatatattggcactgaaaagcctatgttaaaaaataaaaatattgcactgttgtttgaaaaagattctacaagaacgcgatgtgcatttgaagttgcagcgcatgatcaaggtgcaaatgtaacttatttaggcccaactggatcacaaatgggtaaaaaagaaacaactaaagatactgcacgtgtgcttggtggaatgtatgatggcattgaataccgtggtttttcacaaagaacagtagaaactttagctgaatattcaggcgtaccagtgtggaatggtttaactgatgaagatcatcctactcaagttcttgctgatttcttaacagcaaaagaagtcttaaaaaaagattatgcagatattaactttacatatgttggagatggtcgtaataacgttgcaaatgcattaatgcaaggcgctgccattatgggtatgaacttccatttagtttgtccaaaagaattaaatccaacagatgaattattaaatcgctgtaaaaatattgccgctgaaaatggtggcaacatattaatcacagatgatattgaccaaggtgtaaagggttcggatgtaatttacactgacgtttgggtatcaatgggtgaacctgatgaagtatggaaagaacgactcgaattattgaaaccgtatcaagtgaataaagaaatgatggataaaactggtaatcctaatgttatttttgagcattgcttaccatctttccacaatgctgatactaaaattggacaacaaatttttgaaaaatatggaattcgagaaatggaagttacagatgaagtattcgaaagtaaagcttcagttgtattccaagaagctgagaacagaatgcatacaataaaagcagtcatggttgctacattgggtgaattttagatgatataaggaagtgaatataatggcgaaaatagtagtagcattaggtggtaatgctttaggaaaatcacctcaagaacaactcgaacttgttaaaaatactgcgaaatcattagtaggattaataacaaaaggacatgagattgttattagtcatggtaatggaccacaggttggaagcattaatttgggacttaactatgctgcagaacataaccaaggtccggcatttccatttgctgaatgtggcgcaatgagtcaagcttacatcggctatcaattacaagaaagcttacaaaacgaattgcattctattggaatggataaacaagtggtaacactagtgacacaagttgaagttgatgaaaatgatccggcatttaacaatccttcaaaaccaattgggttattttacaacaaagaagaagctgaacaaattcaaaaagaaaaaggatttatatttgttgaagatgctggaagagggtatagacgtgttgttccttcaccacaacccatctctattattgaattagagagtattaaaacacttattaaaaatgatacactcgttattgctgctggtggtggaggtataccagtaattagagagcaacatgatggttttaaaggtattgatgcagttatagacaaagataaaacaagtgcgttgttgggtgctaatattcaatgcgatcaattgattattttaacagcaattgattatgtatatattaattttaacactgaaaaccaacagcctttgaaaacaacaaatgttgatgaattaaaacgatatatagacgaaaatcaatttgcaaaaggaagtatgttaccaaaaattgaagcagccatatcatttattgaaaacaatccaaaaggaagtgtgcttataacatcattaaatgaattagatgctgccatagagggtaaagtaggtactgtgattaaaaagtaattgaattgaaacgcttttcaattactatatgtcaaacgcatgatttttattatttatgtgcacccctgaaaataatgcctctattttgatgcggggtgcactttcttaatttatatttataaaatctttaagatagaaatgctaggttaaatgtcgaaggagatgaaaccgtggaaaatacaattaatgaaagtgaaaagaaaaaacgatttaaattaaaaatgccaggtgcatttatgattttattcattttaacggttgttgcagttatagcaacatgggttattcctgctggtgcatattctaaactttcttacgaaccttcatcccaagaactaaagatagttaaccctcataaccaagtgaaaaaggttccaggtacgcaacaggaactagacaaaatgggggtaaaaattaagattgaacaatttaaatcaggtgcaattaataagccggtatcaattccgaatacttatgaaagattaaagcaacatccagctggaccagaacaaataacaagtagcatggttgaaggtacgatagaagcggtcgatatcatggtattcattcttgtattagggggacttattggcgtagttcaagccagtggttcttttgaatcgggattgttagctttaacgaagaaaacaaaagggcatgaatttatgctaattgtgtttgtatcaatactaatgattatcggcggtacgttatgcggtattgaagaagaagctgtagcattctatccgattttagtccctatatttatagcgttaggatacgactctatcgtttcagttggtgcaatattccttgccagctctgtcggtagtacattttcaactattaacccgttctcggttgtaattgcctctaatgccgctggtacaactttcacggatggtttgtattggagaataggtgcttgtattgtcggtgcgatttttgttattagttatttatattggtactgtaaaaaaattaaaaaagatcctaaagcgtcatattcttatgaagacaaagatgcttttgaacagcaatggtctgtattaaaagatgacgatagtgcccattttactttgcgtaagaagataatccttacattatttgtactaccatttccaattatggtatggggagttatgacgcaaggttggtggttcccagttatggcttcagcatttttaatatttacaattataataatgtttattgctgggacaggtaaatctggattgggagaaaaaggaactgtagatgcatttgtcaatggcgcatcaagtttagtaggtgtatctttaattattggcttagctcgaggtattaatttagtgttgaatgaaggtatgatttcagatacaatcttacacttttcatcatctttagttcaacatatgagtggaccattatttatcatcgtattactatttattttcttctgtttaggttttatcgtgccatcatcttctggattagcggtattatcaatgcctatttttgcaccactagctgatacagtaggtataccaagattcgtcatcgttacgacatatcaatttggtcaatatgcgatgttattcttagcgccgactggacttgttatggccacactacaaatgttaaacatgcgatattcacattggttccgatttgtatggccggtagttgcttttgtattgattttcggtggcggagtactaattacgcaggtactaatttattcctaatttgaaatgctatattataaaaaaatactaattgggttttatgcatctcgtaggtttgtagaaatactaaactaagcgaggtgcattattatttttgattaagaaaataatgacggtaatgataacactagtaagtaattgatacaatgttctatttaataatgatatttttaaaatatgtttttaatgtaatgttagatctatggtatattatatttatcgtggtaaatatgtatttgctgtaaacagtttttgtaacacatgatacatatggttgtgaaaatagcataaataaaggatggctataaatgacacatttgacaaaggttttagatacactaactggaatatgcgtagtattattatttagtaaatattttgtggcgtatgcaaatatggtatttgattggaatttaagatggtatatgctagaaaacataccacatttgccaattatattatttattctgatgtttattttcggagttccttctgaaatgataaaagataggcaaaggaaaaataacggcgtttaatttatcgatatttagaggtgataaaacttgtcaactattacaaaaactaaaataaaaatctttattaattattttattggtatattagctttggcgtttgctgcttatatattatttaaataaagaatagagtgaaacgtgtttatgaattagacgttctagtatagttactacagctttagtcagaaggtatcattgttgttcatacattagatcatattaaatcaaagaggtattgatacacaccaaaaagaggcaagattacctgcctcttttttagttattaaatatgcgtggtaattctgggtaatagtgttactgagacgcattacgaagaaatttatcttgattttccttttttaaaaagaagtgaagatatcctataaagactctaagtactattacagtggctaataacacttcgataaacaaaaggcctttccaaatgactggaaacataagtacaggcaaactgttctttaaagcagttgcagagattactaaagggaatgtgaaagctgaaaatacgggcgaaaaaggttcttttagtaatttaggcaattgtataatgatataaaaataaaatatttgagctaatagtaaaagtataattacgataaaagcattcgccttaggaaaggctataacatatgctgcagcgactaaagaaaatggtgcacaaattgtcgatgtgttcggtttgattgacgtctgcaatggaaatgcttttaatcgcttgaaaactataggtaagacaatacaagtagctacaaagccatatattactgttaattgacctatgaaaaaatatccgctaacgggtgccgtcaatcctgcgatagcaataccaataaaaagtacagtccacgaaggataaacattctcaagtgaaaaatcttttaaatatttaattgaaaaaataatcatatgcgtcataattcccacaaggcataaaatccaaataggcgttattaaattattgataaatgttatattactaaaaaatgtatttaaataagtagtacctaaaaagccagacatgaaaaatgttgtgaacactgatgaaactagagggctgtttaattgttctttcacattattaaaatatttgagcatagtacataaaaggtgaatccaaatcaagaaagcaaaaattccgcaaacagcgtttaaagtaagagataagtcttttaatagattacccaggcctaataatcctaagactagtcctgacgttactagaggtgctttttgaagtctcatgatttacaacctttcttatgtgattttcttcactaattatatcatgatagctatggcctattaataagaagagtgtgtactattacgtttttagagtatgtatattggattgatagacacataattgacatttaaatctcaaaattaatgatatttgaggtatgctttgcaacctaaatattggaatatgtggaaaagtaattatttaatttaaatgatgattgaagatataaaagggggatacaaaatgagaaatcaaattcaaaaactattagacagtgatttgagcagtttacatatatcgaaacaaacaggagtgccacaaagcacaatacacagaatgagaaaaaaagaaagatcattagacaatatgtcattgaaaaacgctgaactactttataaatttgccaatggtatatttagtgatgaaaattaagaagaataattagtgagttaaataattagaaaaccacgtctcgatgggcgtggttgttttttagatgtatataattataataataggatttcgggtccctgaaaagtccctaaaattttgaatagtatcaaaatctatagggataatataataataaaaatctctaagcatgcaaatggtgagtgttaaaaatcttggtgtagttttggtgtagttcaggtgcagtatagatgaaatttgagcgtaaaattacttaattaaaaatgtgtaaacatgtatcaaccgcttgtcaattgtgtgtcaaaaaattctataacgaataagcatgcttgttttaattactgtattttcggagcttatgcgggggacgttttggtgacgcatcatactatattactgaaattcaaaacaaaaagagtcccgtaatcacggaactcttttgtttggtaatgtgtataaaaatacttataaacgtcctgggagggattcgaacccccgaccgatggcttagaaggccattgctctatccagctgagctaccaggacacgtttaacaacacaagaattattatatctaaatgaacttaaattagcaataccttgtaaataaaaaatgtttatatttttcactattatagagctatttatccaaaaaggttcaataagacttaaatacgaattcaggcaacttaattgtgttaaatacagttttgaatgcctaactgtatatcttttctctttaaaatacagttaagtacattataagatgttgtgcggataaacaaactaattgcatcaaatttattttaaaataacaacaacaaaacgttaagcgaataacatttcggtgatttaaaagctacgcacgtttttgttatcttcaaatttaaattttaaggagtgttttcaatggaaggtttatttaacgcaattaaagataccgtaactgcagcaattaataatgacggcgcaaaattaggcacaagcattgtgagcatcgttgaaaatggcgtaggtttactaggtaaattattcggattctaatttcaatatgttatgtaagtaataagtattatttcaaaggtgagggagagatttaaatgactggactagcagaagcaatcgcaaatactgtgcaagctgcacaacaacatgatagtgtgaaattaggcacaagtatcgtagacatcgttgctaacggtgtgggtttactaggtaaattatttggattctaatataataactaatattctttaaaataaactgggtgagcatactttaatgttatgcactcagtttattttatttgcagaagtttgagcctctgttaaaatttagatacatagacaatataggagatggggaaattgggatataaaaatattttgatagactttgatgatacaattgttgatttttatgatgcggaagaatgggcgtttcactatatggcgaatgtttttaatcataaagcaacaaaggatgattttttaacatttaaaaaaatcaatcaccaacattgggaagcttttcaacaaaataaattaacgaagtctgaagtattatcagaacgatttgtgaattactttaaacatcatcaaatggaagttgatgggcatcgtgcagatgtgttatttagaaatggattagcagaagctaaagttaaatactttgatcaaacattagaaacaattgtcgagttatcgaaaagacatgatctatatattgttgctaatggtgtaaccgaaacgcaaaagagaaggttaaatcagacgcagttgcataaatatattaaaaagatatttatatctgaggaaacaggatatcaaaaacctaatccggaattttttaattatgtttttaatgatattggtgaggatgaaagacagcgctcgattatagttggagattctttaacatctgacattctaggtggaatcaatgcgggtatagctacttgctggtttaattttagaggatttgatcataatccaggaattatacctgattatgaaattaattcatggaaacaactaaatgatattgtacgttaagacaaataatttgaaaatgatttacttatattagctaaaaaagtaattgtaaaaaagacactacgaaaagatgcattttcatgctcgtagtgtcgaatattattatcttatggtttccacaataagacatcatgtccctctatatttttagcttccacatctgtaaatccatgatgtaaaaagaaatccttagaatcatttctgccaatggctttaattggcatattgaaactctttgcaaaatcaatcaattctgaagcgtaccctctgttttgatattttggtaatacttctaacttccataataatatataatcttcaaaatctgggaagtagatttcttcgacatcacctttttttagtaatgccattctagctcctaattgatctccgacaaatatgccataaaatggtgaatctgaacttgcatcaatcatttgaccgtttaactcattgaccatgtataagtctttgttgccaaacactctaaagttttcgaataattcgtcagttttgtaattaatttcaagacgtttgatttcactcatatttatctaccccttatttgtttactactattattatacattaaaccacttgtgtttttcattgatttgaaaatgtaaaacaatgaatattataaattttccatgattaaattgattttcaagccgtaaaattgtcaatcaccggtatagactttatactatagtttgtaatcgcgtacttaaggagaaaaaacatggactgtaaagtagttagtttaaatgaaaaagatcagtttataccaaaaataaagagcagtgatcctgtaataacaggattatttcaatatgatgcagctcaacaaactagttttgaaaaaaggatgtctaaagaaaataatggaagagaagcggcattagcgaatgttattcgtgaatatatgagtgatttaaagctttcaagtgaacaagaattaaacatacaatatttagctaatggttcaaaagttgtgattggtggacaacaagcagggcttttcgggggaccattgtatacattccataaaatattttcaatcattactttatctaaggaattaacggatacacataagcaacaagtagtaccagttttttggattgcaggagaagatcatgatttcgatgaagtgaatcatacatttgtttataacgaaaatcatgggtcactgcataaggttaaatatcatacaatggagatgccagagacgactgtctctagatattatcctgataaggctgagttgaaacaaactttaaaaacgatgttcattcatatgaaagaaactgttcatacacaaggtctactggagatttgtgacagaattattgaccaatatgactcgtggactgatatgtttaaagcactactgcatgagacatttaaagcatatggcgttctatttatagatgcgcagtttgagccgttaagaaaaatggaagcgcctatgtttaaaaagattttgaaaaaacatcagttgcttgatgatgcttttagagcaacacaacaacgtactcaaaatcaaggcttgaaggcgatgatacaaacagatacaaatgttcatttattcttacatgatgaaaatatgcgtcaattagttacgtatgatggtaagcattttaaattaaataaaacagataagacatatataaaggaagaaattataaatattgcggaaaatcaacctgaattattttctaataatgtagtgacaagaccattaatggaagaatggctatttaacacggtggcatttattggaggaccgagtgaaattaagtactgggctgaactaaaagatgtatttgaactatttgatgttgaaatgcctatcgtgatgccaaggcttagaattacttatttaaatgaccgtattgaaaaattactttcgaaatacaatattccattagaaaaagtgttagtcgatggtgttgaaggagaaagaagtaagtttattagagaacaagcatcacatcaatttattgaaaaggtagaaggtatgattgaacaacagcgtcgtctaaaccaagacttattagatgaagtggcggggaatcaaaataatattaaccttgtgaataaaaataatgaaattcatatacaacagtatgattatttgttaaaacgttatcttttaaacattgaaagagaaaacgacatcagtatgaagcaatttagagaaattcaagaaacactccatccaatgggaggattacaagaaagaatatggaatccacttcaaattttgaatgattttgggacagatgtgttcaagccctccacctatccaccactttcttacacttttgatcatattattataaaaccttaatataccaagggtttagcccggtttatcttaatgataaatcgggcatttttttgttttttaaaataaatttcacaaattttgtataaatagtggtggatagtggggagatgtggtaaattatatataaggtgaggtgataaaaaatgttcatgggagaatacgatcatcaattagatacaaaaggacgtatgattataccgtccaagtttcgttatgacttaaatgagcgttttattatcacaagaggccttgataaatgtttattcggttacactctagacgaatggcaacagattgaagagaaaatgaaaaccttacctatgacaaaaaaagacgcacgtaagtttatgcgtatgttcttctctggtgctgttgaagtagaacttgataagcaagggcgtattaacatccctcaaaacttgaggaaatacgctaatttaactaaagaatgtacagtaatcggtgtttcaaatcgtattgagatttgggatagagaaacttggaatgatttctatgaagaatctgaagaaagtttcgaagatattgctgaagatttaatagattttgatttttaaaatggaggaattgaagtgtttcatcatatcagcgttatgttaaacgaaaccattgattatttaaatgtaaaagaaaatggtgtgtacattgactgtacgctaggtggagcgggacatgccctttatttactaaatcaattaaatgacgacggaagattaatagcaatcgatcaagaccaaactgcaattgataatgctaaagaagtattaaaggatcatttgcataaggtgacttttgttcatagcaacttccgtgaattaactcaaatattaaaagacttaaacattgaaaaagtagatggaatctattacgacttgggtgtttcaagcccacaactcgacattccagaacgaggattcagttatcaccatgacgcaacattagacatgcgtatggaccaaacacaagaactaacagcatatgaaattgttaacaattggtcatatgaagcgttagtgaagattttttatcgctatggcgaggagaaattttcaaaacagatagctcgaagaatcgaagcacatcgcgaacaacaaccaataacaacaacattagaattagttgacattataaaagaaggtattcctgcaaaagcaagaagaaaaggcggacatcctgcaaaacgagtatttcaagcactacgaattgcagtaaacgatgaattgtcagcttttgaagattcaatagaacaagcgattgaattagtgaaagtagacggcaggatttcggtaatcactttccattctttagaagatcgtttatgtaaacaggtgttccaagaatatgaaaaaggtccagaagtaccaagaggattaccagttataccagaagcatatacacctaagttaaagcgtgttaatcgtaaaccgattaccgctacagaagaagatttagatgacaataacagagcacgaagcgcgaaattacgtgtagctgaaatacttaaataaggagcaatttataatggctgtagaaaaagtgtaccaaccatatgacgaacaagtttataatagtataccgaagcaacaaccacaaactaagcccgaaaagaagactgtttcgagaaaagtggttgtacaattaactaaatttgaaaaagttttatacataactttgattactgtaattgctatgttaagtatttatatgctatctttaaaaatggatgcgtatgatacgcgaggaaagattgcagatttagattataaaatagataaacaatcaagtgaaaacagtgctttacaatctgaaatcaaaaagaattcttcttatgaacgcatatacgaaaaggctaagaaacaggggatgagccttgagaacgataatgtaaaggtagtgcgtagtaatggcgaagcaaaaaattaaaattaaaaaaaataaaataggggcagtcctacttgttggtttattcggactgctcttttttatattggttttaagaatttcatatatcatgattactggacattctaatggtcaagatttagtcatgaaggcaaatgaaaagtatttagttaagaatgcacaacaaccagaacgaggaaagatatatgatcgtaatggtaaagtgctagcagaagatgtagaaagatataaacttgttgcagtaatagataaaaaggcgagtgccaattctaaaaaacctaggcatgtagttgataaaaaagagactgcaaagaaattatctacagtcattgatatgaagccagaggaaattgaaaagagacttagtcaaaagaaagccttccaaattgaatttggacgcaaaggaacaaatttaacgtatcaggacaaattgaaaatagagaaaatgaatttgcctggtatttctttattgcctgaaacagaacgcttttatccaaatggcaattttgcatcacacttaattggtagagctcagaaaaatccggatactggtgaacttaaaggtgcgcttggagttgaaaagatttttgatagttatttaagtggatctaaaggatcattgagatatattcatgatatttggggatatattgcaccaaatactaaaaaagagaagcagcctaaacgtggtgatgatgtccatttaacaatcgattcaaatattcaagtatttgttgaagaagctttagatggcatggttgaaagataccagccgaaagatttatttgcggttgtcatggatgccaaaactggagaaattttagcatacagtcagcgaccaacatttaatcctgaaactggtaaagactttggtaaaaagtgggcaaatgacctttatcaaaacacatacgagcctggatcaacatttaaatcatatgggttagcagctgctattcaagaaggtgcttttgatcctgataagaaatataaatctggacatagagatattatgggttcacgcatttcagactggaatagagtcggttggggtgaaatcccaatgtcactcggatttacttattcatctaatacattgatgatgcatttacaagatttagttggtgcagacaaaatgaaatcttggtatgaacgatttggatttggaaaatcaactaaaggtatgtttgatggagaagcacctggtcaaattggatggagtaatgaattgcaacaaaaaacgtcatcatttggtcaatcgacaacagtaacacctgttcaaatgttacaagcgcaatcagcgttctttaatgatggtaatatgttaaaaccatggtttgtgaatagcgttgaaaatcctgttagtaaaagacaattttataaaggtcaaaaacaaatcgcaggcaaaccaataacaaaagatactgctgaaaaagttgaaaagcaattggatttagttgtgaatagtaagaagagtcacgctgcaaactatcgtattgatggttatgaggtcgaaggtaagactggtacagcacaagtcgctgcacctaatggtggtggatacgttaaaggtccaaacccatattttgtaagttttatgggtgacgcgccgaagaaaaatcctaaagttattgtatacgctggtatgagcttggcacaaaaaaatgaccaagaagcttatgaattaggtgttagtaaagcgtttaaaccaataatggaaaatactttgaaatatttaaatgtaggtaaatcaaaagatgacacatctaatgcagagtatagtaaagtgccagatgttgaaggtcaagacaaacaaaaagctattgataatgtgagtgcaaaatcattagaaccagttactatcggttctggcacacaaataaaagcgcaatctataaaagcagggaataaagtcttacctcatagtaaagtactgttattaacagatggagacttaactatgcctgacatgtcaggatggacgaaagaagatgtcattgcttttgaaaacctaacaaatattaaagtgaatttaaaaggtagcggttttgtgtcccaccaatcaattagtaagggacaaaaacttactgaaaaagataaaatagacgtagaattttcatcagagaatgtagacagcaattcgacgaataattctgattcaaattcagatgataagaagaaatctgacagtaaaactgacaaggataagtcggactaacaagaatggctacattaaataaggatgtattgtcactatttgtttttactaaagtaatgctgtgatagaaaacaacatcttcatttaatctttataaataagtgttgatagagaattttaaggtagacgaggtcagattaacttgtttgttataggcaaactttttatactggcctcttatgccgtaaaaaagaaaaattataaattttgattacaactttgtttatttaattgaaaaattgataatatattagtggttaaaaaagtctggattaagaagaggagatagttatgatttttgtatatgcgttattagcgctagtgattacatttgttttggtacctgttttaatacctacattaaaaaggatgaaatttggtcaaagtattcgagaagaaggtccgcaaagccatatgaagaagactggtacaccaacgatgggtggactaacatttctattaagtattgtgataacgtctttggtggctattatatttgtagaacaagctaatccgatcatactgttattatttgtgacgattggttttgggttaattggttttatagatgattatattattgttgttaaaaagaataaccaaggtttaacaagtaaacagaagtttttggcgcaaattggtattgcgattattttctttgttttaagtaatgtgtttcatttggtgaatttttctacgagcatacatattccatttacgaatgtagcaatcccactatcatttgcatatgttattttcattgttttttggcaagtaggtttttctaatgcggtaaatttaacagatggtttagatggattagcaactggactgtcaattatcggatttacaatgtatgccatcatgagctttgtgttaggagaaacggcgattggtattttctgtatcattatgttgtttgcacttttaggatttttaccatataacattaaccctgctaaagtgtttatgggagatacaggtagcttagctttaggtggtatatttgctacgatttcaatcatgcttaatcaggaattatcattaatttttataggtttagtattcgtaattgaaacattatctgttatgtcacaagtcgctagctttaaattgactggaaagcgtatatttaaaatgagtccgatacatcatcattttgaattgataggatggagcgaatggaaagtagttacagtattttgggctgttggtctgatttcaggtttaatcggtttatggattggagtgcattaagatgcttaattacacagggttagaaaataaaaatgtattagttgtcggtttggcaaaaagtggttatgaagcagctaaattattaagtaaattaggtgcgaatgtgactgtcaatgatgggaaagacttatcgcaagatgctcatgcaaaagatttagaatctatgggcatttctgttgtaagtggaagtcatccattaacattgcttgataataatccaataattgttaaaaatcctggaataccttatacagtatctattattgatgaagcagtgaaacgaggtttgaaaattttaacagaagttgagttaagttatctaatctctgaagcaccaatcatagctgtaacgggtacaaatggtaaaacgacagttacttctctaattggagatatgtttaaaaaaagtcgcttaactggaagactatccggcaatattggttatgttgcatctaaagtagcacaagaagtaaagcctacagattatttagttacagagttgtcgtcattccagttacttggaatcgaaaagtataaaccacacattgctataattactaacatttattcagcgcatctagattaccatgaaaatttagaaaactatcagaatgctaaaaagcaaatatataaaaatcaaacggaagaagattatttgatttgtaattatcatcaaagacaagtgatagagtcggaagaattaaaagctaagacattgtatttctcaacacaacaagaagtagatggtatttatattaaagatggttttatcgtttataaaggtgttcgtattattaacactgaagatctagtattgcctggtgaacataatttagaaaatatattagcagctgtgcttgcttgtattttagctggtgtacctattaaagcaattattgatagtttaactacattttcaggaatagagcatagattgcaatatgttggtactaatagaactaataaatattataatgattccaaagcaacaaacacgctagcaacacagtttgccttaaattcatttaatcaaccaatcatttggttatgtggtggtttggatcgagggaatgaatttgacgaactcattccttatatggaaaatgttcgcgtgatggttgtattcggacaaacgaaagctaagtttgctaaactaggtaatagtcaagggaaatcggtcattgaagcgaacaatgtcgaagacgctgttgataaagtacaagatattatagaaccaaatgatgttgtattattgtcacctgcttgtgcgagttgggatcaatatagtacttttgaagagcgtggagagaaatttattgaaagattccgtgcccatttaccatcttattaaagggtgtgagtattgatggatgataaaacgaagaacgatcaacaagaatcaaatgaagataaagatgaattagaattatttacgaggaatacatctaagaaaagacggcaaagaaaaagatcaaaggctacacatttttctaatcaaaataaagatgatacatctcaacaagctgagtttgatgaagaaatttacttgataaataaagacttcaaaaaagaagaaagcaaagatgaaaataatgattctgcttctagtcatgcgaatgataataatatcgatgattctacagactctaatattgaaattgaggattatagatataatcaagaaattgacgaccaaaatgaatcgaatggaattgcagtcgacaacgaacaatctcaatcagctcctaaagaacaaaatagcgactcgaatgatgaggaaacagtaacgaaaaaagaacgaaaaagtaaagtaacacaattaaagccattaacacttgaagaaaagcggaagttaagacgtaagcgacaaaaacggatccaatacagtgttattacaatattggtattgttgattgctgttatattaatttacatgttttcaccacttagtaaaattgcgcatgtaaatataaatggaaataatcacgttagtacttcaaagataaacaaagtgttaggtgttaaaaatgattcgaggatgtatacgtttagtaaaaaaaatgctattaatgatctcgaagaggatccattaatcaaaagtgttgagatacacaagcaattaccaaacacattaaacgtagatatcacagaaaatgaaattattgctttagtgaaatataaaggtaaatatttacctttattagaaaatggtaaattgcttaaaggttcaaatgatgtcaaaattaatgatgcacctgtcatggatggtttcaaaggtacaaaagaagatgatatgattaaggcgttatctgaaatgacacctgaagttagacgatatattgccgaagtgacatacgccccaagtaaaaacaaacaaagcagaattgaattgtttacgacagatggacttcaagtaatcggtgatatttcgacgatatctaagaaaatgaaatattatccgcagatgtcacaatcattatcaagagatagttcgggtaaactaaaaacacgaggctatattgatttatcagtcggtgcttcatttatcccataccgtggaaacacgtctactcaatcagaaagcgataaaaatgtgactaaatcatctcaagaggaaaatcaagcaaaagaagaattacaaagcgttttaaacaaaattaacaaacaatcaagtaagaataattaaaaaattttgatattgtctatgtttatagttcacaagccattcaacgtattgtaaactaaagatagtgtattttttaatagtaatttgtcaggaggtgcctatctatggaagaacattactacgtaagtattgatattggatcatcaagcgtaaaaacaatagtaggcgagaaatttcacaatggtataaatgtgataggtacaggacaaacctacacgagcggtataaaaaatggtttaattgatgattttgatattgcgcgtcaagcaatcaaagacacaattaaaaaggcatcaatcgcttcgggtgttgatattaaagaagttttcctgaaattacctatcattggaacggaagtttatgatgaatcaaatgaaatcgacttttatgaggatacagaaatcaacggttcacatatcgaaaaagtattagaaggtattagagaaaaaaatgatgtgcaagaaacagaagtaattaatgtgttcccgattcgttttatagtcgataaagaaaatgaggtttcagaccctaaagaattaattgccagacattcattaaaggttgaagcaggcgtaattgctattcaaaaatcgattttaattaatatgattaaatgcgttgaagcatgtggtgttgatgtattagatgtttattctgatgcatataactacggttcaatcctaacagctactgaaaaagagttaggtgcatgtgtcattgatattggtgaagacgttacgcaagttgctttttatgaacgcggtgaattagtagatgctgattctatcgaaatggcagggcgtgatattacagacgatattgcacaagggttaaacacttcttatgaaactgctgaaaaagttaaacaccaatatggtcatgcattctatgattctgcttcagatcaagatatcttcactgttgaacaggttgatagtgatgaaacagtacagtatactcaaaaagatttgagtgactttattgaagcgcgtgtagaagaaatattcttcgaagtatttgatgttttacaagatttaggattaacaaaagtaaatggtgggtttattgtaactggtggatctgcaaacttacttggcgtaaaagaattattatcagatatggtaagtgaaaaagttagaattcacacgccatcacaaatgggaattagaaaacctgaattttcttcagcaatttctacaatttctagtagtatcgcttttgatgagttattagattatgttacaattaattatcatgataatgaagaaactgaagaagatgttattgatgtgaaagacaaagataacgaatctaaattaggcggatttgattggtttaaacgtaaaacaaacaaaaaagatactcatgaaaatgaagtagagtcaacagatgaagaaatttatcaatcagaagataatcatcaggaacataaacagaatcatgaacatgttcaagacaaagataaagaagaaagtaaattcaaaaaactaatgaaatctctatttgaatgattattggccaataaaactaggaggaaatttaaatgttagaatttgaacaaggatttaatcatttagcgactttaaaggtcattggtgtaggtggtggcggtaacaacgccgtaaaccgaatgattgaccatggaatgaataatgttgaatttatcgctatcaacacagacggtcaagctttaaacttatctaaagctgaatctaaaatccaaatcggtgaaaaattaacacgtggtttaggagcaggagctaatcctgaaatcggtaaaaaagctgcagaggaatctcgtgagcaaattgaagatgcaatccaaggtgcagacatggtatttgttacttctggtatgggtggcggaactggtactggtgcagcaccagtcgttgctaaaattgcaaaagaaatgggcgcattaactgttggtgttgtaactcgtccatttagttttgaaggacgtaaacgtcaaactcaagctgctgctggagtagaagctatgaaagctgcagtagatacattaatcgttataccaaatgaccgtttattagatatcgttgacaaatctacgccaatgatggaagcatttaaagaagctgacaacgtgttacgccaaggtgtacaaggtatctcagacttaatcgctgtttctggtgaagtaaacttagactttgcagacgttaagacaattatgtctaaccaaggttctgcattaatgggtattggtgtttcttctggtgaaaatagagcggtagaagctgctaaaaaagcaatctcttctccattacttgaaacatctatcgttggtgcacaaggtgtgcttatgaatattactggtggcgagtcattgtcattatttgaagcacaagaggctgctgatattgtccaagatgctgcagatgaagacgttaatatgattttcggtacagttattaatcctgaattacaagatgagattgttgtaacagttattgcaactggttttgatgacaaaccaacatcacatggtcgtaaatctggtagcactggattcggaacaagcgtaaatacttctagcaatgcaacttctaaagatgaatcattcacttcaaattcatcaaatgcacaagcaactgatagtgtaagtgaaagaacacatacaactaaagaagatgatattcctagcttcattagaaatagagaagaaagacgttcaagaagaacaagacgttaatcggttaatatatacacaaataattcaacacaaatcatcagataacatatctgatgatttttttactaatttttagaacatgtagaaggacatttaagtttttcgaagtcattaaaagtgtttaagtatcgtgtcaaaattaagtcaaaaattatttgcgcaacattttaactttaaacataaatgttatattatataattattaactttgtacagttagacgaagataatttaaatgaaatgatggtgacgatcgagtgaatgataattttaaaaagcaaccgcatcatttaatatatgaagaattattacaacaaggtattactctaggtattacaactagaggcgatggtttaagtgactatcctaaaaatgcttttaatatggcgagatatattgatgatcgtccatataatattactcaacatcaattgcaattagctgaagaaattgcgtttgatagaaaaaattgggtgtttcccatccaaacacatgaaaataaagtcgcttgtataacaaaggatgatataggcacaaatatagacactttaactgatgcgcttcatggtattgatgcgatgtacacatatgatagtaatgtcttattaacgatgtgttatgcagactgtgtaccagtatatttttatagtacaaaacatcattttattgcattggcccatgcagggtggcgtggtacctatactgaaattgtaaaagaagtgctaaaacatgtgaactttgatttgaaagacttacatgtcgttattggaccatctacatcatcaagttatgaaattaatgatgatattaaaaataaatttgaaacattgccaattgatagtgcaaactatattgaaactagaggacgagatcgtcatggtattgatttgaaaaaagccaatgctgcattattaaataattatggtgttcctaaagaaaatatttatacgacagcgtatgctacatctgaacatttagaattatttttctcttatcgattagaaaaaggtcaaacaggacgcatgttagcattcattggtcaacagtaaacaaggaggagatatgcttgcgtgtgaaagataatttacaacaaatctcaacacaaattaatgacaaaagtgaaaaaaataatttttcaacaaaaccaaacgtgattgcagttacaaaatatgttacaatagagcgagctaaagaagcgtatgaggctggaataagacattttggtgagaatagattggaaggcttttttcaaaagaaagaagcattaccatcagatgcggtgatccattttataggatcattacaatctcgaaaagttaaggacgttataaacgacgtagattatttccatgctttagatcgattgagcttagccaaagaaattaacaaacgtgcagaacataaaattaaatgtttcttgcaagtgaacgtttcgggagaagcttctaaacatggtattgctttagaagatgttgatcagtttataggtgatcttaaaaaatatgacaaaatcgaaattgtaggtttaatgacgatggcaccattgacagatgatgaagcatatattagatcgttatttaaacagttacgtttgaaaaaagaagaaatacagcgactcaatttagaatatgcgccttgtgatgaattatcaatgggaatgagtaatgactatcttattgcagttgaagaaggtgcaacgtttgttagaattgggactaaacttgtaggagaagaggagtgagccacttggctttaaaagatttatttagtggattttttgtaatagatgatgaagaggaagtagaagtacctgacaaacaacaacaggtaaatgaagcgccagcaaaagagcagtcacaacaaacaacaaaacaaaacgcaatcaaatcagtccctcaaaaatctgcatcaagatatacaacaacgtcagaagaaaggaataaccgtatgtctaattattcaaaaaataattcacgtaatgttgtaactatgaacaatgctacaccaaacaatgcatcacaagaaagttcaaaaatgtgtttattcgaaccacgtgttttttcagatacacaagatattgctgatgagcttaaaaaccgccgtgcgacacttgtcaatttacaacgtattgataaagtatcagcgaaaagaattattgattttttaagcggtactgtttatgcaatcggtggagatatccaacgtgtaggtactgatattttcttatgtacgcctgataatgtggaagtagctggaagcattacagaccatattgaaaatatggaacattcattcgactaaggagttaacatatggatataaatgtgctagctacaatatttaaatttatcctttttgttgttgaaatttattatttcggcatgattatatatttctttacatcttgggtaccaagtattagagaaactaaggtaggttattttttagcgaaaatatatgaacctttcttacaaccatttagaaaagtaattccacctattggaattatcgacatatcatcaatcgctgcaattatcgttttagtattattccaaaaagggttacttcaaatctttaattggattttaattcaattacaataaattaagcgacataacgaggcaagggtacatgatactttagcctcgtttttgatatgtatttttctgaatataagggcaatagatggtattttataatttttttaaggtagggattaacatagatatttatcaacactttagacaggaagaatacgaattaattgatcagctaacggataaatgtgatcaagcggaacagcattatgcaccagtattaacgcattttttagatccaagagggcaatatatattggaagtgatttgtggcagttatgaagatttaaacgtatctttttatggcgggcctaatgctgaaagaaaaagagcaatcatttcgccgaactattatgaacctaaagaaagtgactttgatttaactttaatggaaatagattatcctgaaaaattcgtcactttaaaacatcaacatattttagggacattaatgtctttaggtatcgaacgcgaacaagttggagatataattgtgaatgaacgaattcaatttgttttgacaagtagattggaatcatttattatgttagaattacaacgtattaaaggcgcatcagttaaactttatactattccagtaacagatatgatacaatctaatgagaattggaaaattgaaagtgcaacagttagttctttaaggttagatgttgttattaaagaaatgatacgtaaatcacgtacgattgcgaaacaactaatcgaaaaaaaacgtgttaaagtgaatcacactattgttgattcagcagattttcaattacaagcaaatgatttaatatccatccaaggttttggtagagcacacattactgacttaggtggtaaaactaaaaaagataaaacgcacattacctatagaacattattcaaatagtaatgatttaaggaggataacaaatgccttttacaccaaatgaaattaagaataaagagttttcacgtgtaaagaatggtttagaacctactgaagttgctaattttttggagcaactaagcactgaaattgaacgtcttaaagaagataaaaaacaacttgaaaaagtaatcgaagagagagatactaatattaagtcttatcaagacgtgcatcaatctgtaagtgatgctttgatacaagctcaaaaagctggtgaagaaactaagcaagctgcagagaaacaagctgaagcgattatagctaaggcagaagcgcaagctaatcaaatggttggtgacgcggtagaaaaagcacgccgtttagcattccagactgaagatatgaaacgtcaatcaaaagtatttagatcgcgtttccgtatgttagttgaagcgcaattagacttattaaaaaacgaagattgggattacttgttgaattatgatttagacgctgaacaagtgacgcttgaaaatattcatcatttacatgaaaatgatttaaagccagatgaggttgcagcaaatgcacaaaataatgcatcaaatacatcagacaataatcaacaatccaatgattcagaaacaactaagaagtaagaattaaataaagacagacgcgtaatatacatttaacttttcacagcgaattaggtaatggtgagagcctagtaaaagcatgtatgttatatcactgactttttaatatttaaataatgtaatgagagaactctaagttgagttaataagggtggtaccgcgagcaatcgtcccttttaatttaacttagagttttttaaatttttaaggagtgaaaaaaatggattacaaagaaacgttattaatgcctaaaacagatttcccaatgcgaggtggtttaccaaacaaggaaccgcaaattcaagaaaaatgggatgcagaagatcaataccataaagcgttagaaaaaaataaaggtaacgaaacattcattttacatgatggcccaccatacgcgaatggtaacttacatatgggacatgccttgaacaaaattttaaaagactttattgtacgttataaaactatgcaaggattctatgcaccatacgtaccaggttgggatacacatggtttaccaattgaacaagcattaacgaaaaaaggtgttgaccgtaagaaaatgtcaacagctgaattccgtgagaaatgtaaagaatttgctttagaacaaattgaattacagaaaaaagattttagacgtttaggtgtgcgtggtgactttaatgatccatatattacattaaaacctgaatacgaagctgcacaaattcgtatttttggagaaatggcagataaaggtttaatttataaaggtaaaaagccagtttattggtctccttcaagtgagtcttcattagcagaagcagaaattgaatatcacgataaacgttcagcatcaatttacgttgcatttgacgttaaagatgacaaaggtgtcgttgatgcagatgctaaatttattatctggacaacaacgccatggacaattccatcaaatgttgcgattaccgttcatcctgaattaaaatatggtcaatacaatgtaaatggcgaaaaatatattattgcagaagccttatctgacgctgtagcagaagcactggattgggataaagcatcaatcaaattagaaaaagaatacacaggtaaagaattggagtatgttgtagcacaacatccattcttagatagagaatcgttagtgattaatggtgatcatgttactacagatgctggtacaggttgtgtacatacagcaccaggtcacggggaagatgactatattgttggtcaaaaatatgaattaccagtaattagtccaatcgatgataaaggtgtatttactgaagaaggcggccaatttgaaggaatgttctatgataaagctaataaagccgttactgatttattaacagaaaaaggtgcactattaaaattagactttattacacatagctatccacacgactggagaacaaaaaaacctgtaatcttccgtgctacaccacaatggtttgcttcaatcagtaaagtaagacaagatattttagatgcaatcgaaaatacaaacttcaaagtaaattggggtaaaacacgtatttacaatatggttcgtgaccgtggcgaatgggttatttctcgtcaacgtgtttggggtgtaccgttaccagtattttatgctgaaaatggcgaaattatcatgacgaaagaaacagtaaatcatgttgctgatttatttgcagaacacggttcaaatatttggtttgaaagagaagcgaaagacttactaccagaaggatttacacatccaggcagccctaacggtacatttactaaagaaacagacattatggacgtttggtttgattctggttcatcacaccgtggcgtgttggaaacaagaccggaattaagtttcccagcagatatgtatttagaaggtagtgaccaatatcgtggttggttcaactcttctattacaacttcagttgctacaagaggagtatcaccttataaattcttactttctcatggttttgttatggacggtgaaggtaagaaaatgagtaaatctttaggtaatgtgattgtacctgaccaagtggttaaacaaaaaggtgctgatattgcgagactttgggtaagtagtacggactatttagctgatgttagaatttctgatgaaattttaaaacaaacatctgatgtttatcgtaaaatcagaaatacattaagatttatgttaggtaatattaatgatttcaatcctgatacagatagcgttcctgaatcagagttattagaagtggatcgttacttgctaaatcgtttacgtgaatttactgcaagtacgattaacaactatgaaaactttgactacttaaatatttatcaagaagttcaaaactttatcaatgttgagttaagtaatttctatttggattacggtaaagatattttatatattgaacaacgtgattctcatatccgtcgtagtatgcaaacagtgttatatcaaattttagttgatatgacgaagttgttagcaccaatcttagtgcatacagctgaagaagtttggtctcatacaccacatgttaaagaagaaagtgttcacttagcagacatgcctaaagttgtagaagtagatcaagctttattggataaatggcgtacatttatgaatttacgtgatgatgtgaaccgtgcattagaaactgctcgtaatgaaaaagttattggtaaatcattagaagctaaagttacgattgctagtaacgataaatttaatgcatctgaattcttaacttcatttgatgcattacatcaattatttatcgtgtcacaagttaaagttgtagataagttagatgatcaggcaacagcttatgaacatggtgatattgtcatcgaacatgcagatggtgaaaaatgtgaaagatgttggaactattcagaggatcttggtgctgttgatgaattgacgcatctatgtccacgatgccaacaagttgtaaaatcacttgtataattgaaattgtataaagtactcatacagatgatataaattaaagctctcttcataatcatgttgtagtttttgttgacatgatgaagagagtttttttgcgaataaaaaaatgaccaagttactggttatatgtgttaaaaaatgtgtaatttactaaaataaaaattattcaggaatggtacaaattctctgcagcttataaatgcgttatagttgctattctcaattatgttcgcgataattttaagtaaaagtaagtacagatattgaatttgataggagttaattgaatgtatcataacagtaacgcaaactttgtaaatggtatcactttaaatgtaagagataagaatgaattaaagccattttatgaggacgtattaggattaaatattataaatgagacattaacatcgatacaatatgaagtaggtcaaaataatcatgtcattacacttgttgaattacaaaatggacgtgaacctttaatgtcagaagcgggactgtttcatatcgcaattaaactacctcaaattagtgatttagctaatttactaattcatttaagcgaatatgatattccagttaacggaggtatacagcctgcttcgttatcattattttttgaagacccggaaggaaacggttttaaattttatgttgataaagacgaagcgcaatggacgaggcaaaatgatttagtaaaaattgatattagaccattaaatgtaccgaggttagtgagtcatgcaacaaaattgttatggttaggtattccagatgacgctattataggtgcattgcatattaagacaattcatttatcagaggtaaaagactactacctcgattattttggattagagcaatcggcatatatggatgattattcaatatttttagcatcgaatggctattatcaacatttggccatgaatgattgggtatcagcaacgaaacgtgtagaaaattttgatacgtatggattagcaattgttgactttcattatcctgaaacaacacatttaaatttacaaggtccggatggtatctattatcgctttaatcatttcgaagttgaagattagtatatactttgaatggacgaaccatataatgaatcggttttaatgatctttttatacaggctatgaaggagcttgagacattaagttcttaggcaatgtaaaaagctgatttctattaattatttgatagaaatcagcttttttgatatgtattttataatgtacagctcgttgagctgctattttccttatattaagtgccattaatacaaaacctagctctcgtttaactttatttattcctcgaactgacattcgagtgaaacccaaaatagccttcataaatccaaaaacaggctctacatcaatttttctttgactatagatttttttcgtttctggttcagaaagcttttgattaatttgggctttaaagaattcccaattataattcttcataattttcttattggatttcgaatttggcttcatgcattgatgtctcaaagaacatgatgaacagtcatcacattcatatagtttgaagtcacgtttaaaaccatatctatcattacggtatgcatatcctttaaaacctattcttttgttattaggacatataaattcatcattaagttcgtcatatttccaattttgagtgttaaaaatggaattaaagttctagtatctgtcgggttttgaaataggtcataggataaaacaaattgagaatttgttgctatttgtaaattgtatcctggcttaagttggccatttttcatatggtcttccttctttctcataaaagttgcatcatgatcagcgctgcttactttaaaatatcgttctccatttttaaatgttgaacttctttacgtaatttaatcagctctttttcttcatctgataagttatcttggtgattgaatgtacccgtgttttgatgttgctttatccattttcctaacgccgaaggtgttaaatcatactcgcgtataatttcattcctaggcttaccattttcaaataatctaaccatttgtaacttatactctgaactaaatgatcttctttctcttgtcataataaaatagcctactttcttaaattaacaatatctattctcatagaatttgtccaattaagtgtagacgattcatgtcttatttttttaaagtatttaaaagtaaaattacatgttaatacgtagtattaatggcgagactcctgagggagcagtgccagtcgaagaccgaggctgagacggcaccctaggaagggacccatcatcaaaaattctatttatagaattttacagtaatgtgccagatgggcatagcgaagccattcaatacgaagtattgtataaatagagaacagcagtaagataatttttaattagaaaatatcttactgctgtttttttagggattaatgtcccagcctctttcataatttttaatgttatcttaaaaatgataaatgaataattaagttcatatttaatgtcaaaacatagtagtttatcaagtattgagttagtaacattagatttaatgtaatatgcttactttttttattagcaggtgtaagctataatataaagagttgtcttatggacgattgattggaggaacgaaaatgcacaaaaaatattttattggcacttccattttaatagcagtatttgtcgttatatttgaccaagttactaaatatattatagctactacaatgaaaattggagattcatttgaaatgataccgcactttttaaacataacatcacatcgaaataatggtgctgcatggggaatattgagtggaaaaatgacatttttctttattattaccattattatattaatagccttagtatatttctttattaaagatgctcaatataatttgtttatgcaagttgctattagtttactttttgcaggtgcacttggaaactttattgatagagttttaacaggagaagttgttgactttattgatacaaatatttttggttatgattttccaatatttaatatcgcagattcaagtttaacaattggtgtaatattaattattattgccttattaaaggatacttccaataaaaaggagaaggaggttaagtaatggagacttatgaatttaacattacagataaagaacaaacaggtatgcgtgtagataagttgctgcctgaattaaatagtgattggtctcgtaaccagatacaagattggattaaagcaggtttagtcgttgcaaacgataaagttgttaaatctaattataaagtgaaacttaatgatcatatagttgtcactgaaaaagaagtggttgaagctgacattctacctgaaaatttaaatttagatatttattatgaagatgatgacgttgcagttgtatataaaccgaaaggcatggtagttcatccatcaccaggtcattataccaatacattagttaatggtttaatgtatcaaattaaagatttatcgggtattaatggagaaattcgtccaggtattgttcaccgtatagatatggatacttctggtttattaatggttgctaaaaatgatattgctcatcgtgggcttgtagaacaattaatggataaatctgttaaaagaaaatatatcgctttagttcacgggaatattcctcatgattacggtacaatcgatgcgccaattggtagaaacaaaaatgatcgtcaatctatggctgttgttgatgatggtaaggaagcagtgacacattttaacgtactagaacattttaaagattatacgcttgttgaatgtcaacttgaaacaggacgtacgcatcaaatccgtgtgcacatgaaatatattggcttcccattagttggtgatccaaagtatggaccgaaaaagacattggatattggtggtcaagctctacatgctggacttattggattcgaacatccagtaacaggtgaatatattgaaagacatgctgaattaccacaagactttgaagatttattagatacaattcgaaaaagagatgcataattgtgtcgtgctataattacgataacattattatgtaaactataagtatttatcgtttcgttttttaaaaatgaaaacacattataaaatagattaaggttaacatttttactgagaatggttaatttttcaatatagattgacaaagcgcctgattagtattatccttataacagtttaagtacaacataaagagtctttaattgagcgtccagagagacgtcaaagacatgaaaatatatatatactaaaatgaatcataacactttcacatatgcaagaataagtagtaatactacgattcttctatgtaaataggctgattgtatatactaaacctcatgtcgatattaaagacatgaggttttttgtttctaaattttgaaagggtgagaatatgtctgaacgtatcataatggatgatgccgcaatacaacgtacagtaacgagaatcgctcatgaaattttggagtataacaaaggtactgataatttaattcttttaggtatcaaaacaagaggtgaatatttagcaaatcgtatacaagataaaattcatcaaattgagcaacaacgtatacctacaggaacaattgatattacatactttagagatgatatagagcacatgtcatcacttacgacaaaagacgcaatagacattgacacagatatcacagataaagtagtcatcattattgacgatgtgctgtatactggtcgaacggttcgtgcttcacttgatgctattttgctaaatgctagacctattaaaattggtttagctgccttggttgatcgaggacatcgtgagttaccaattcgagcagattttgttggtaaaaatatacctacttctaaagaggaaacggtaagtgtctatttagaagaaatggatcaaagaaatgcagttataattaaataataccccttttaattcagtacgagagactgaaaaaggtgggggagttgaatgataaataagttttcatatgcttgtttatctaataataccctcatgttcgacaactataagtcaatttctacggacgaaaatgacttgtagcaacttgtcacactttttgtctctttacatatactgatgtaaagagatttttttattatcggaggaaatgaatattatgcaaaatgatgaaatgtttgaacgaacagtaaaacctgtactagatgtaaatgaaaaaccacaaccagcgcaatgggcatttttaagcttacaacatttatttgcgatgtttggcgcaacagtactagtaccattcttaacaggattaccaatatccgcagcgttactagcttcgggaatcggtacattactttatatcttaataacgaaggcgcaaataccagcatacttgggatctagctttgcatttatcacaccaattatcacgggattaagtacacatagcttaggagacatgcttgtagcattattcatgagtggtgttatgtacgtcatcatcgggattctaatcaaattaagtgggacagcatggttaatgaaattattaccaccagttgttgtaggaccagtcatcatggtaattggtttaagcttagcgcctactgcagtcaatatggcaatgtatgaaaatcctggagatatgaaaggttacaatatcagtttcttaattgttgcaatgataaccttgcttgtaacaatagtcgttcaaggattttttaaaggatttctatctttaattccagtacttgtaggtattatcgtaggttatgtggtagcgatttttatggggattgtgaaatttgatgcaattatgtcagcaaaatggatagatttccctcatatttatctgccatttaaagattatgtaccttcatttcacttaggacttgtacttgtaatgattccgattgtatttgtaacagtaagtgaacatattgggcaccaaatggtactgaataaaatcgtaggtagaaacttctttgaaaagccaggacttgataaatcaatcattggtgatggtgtttctacaatgtttgccagtattattggtggaccaccaagtacaacatacggtgaaaatatcggtgtattagcgattacaagaatatacagtatttacgtcattggtggtgcggcagttatagcaattgttttagcattcattggtaagttcactgcattaatttcttctatacctacaccagttatgggaggagtatctatattacttttcggtattattgcagcaagtggtttaagaatgttagttgaaagcaaagtagattttgcgaacaatcgaaatttagttatagcttcagtaattttagttgtaggtatcggtaatttagtatttaacttaaaagaaattggtatcaaccttcaaattgaggggatggcattagctgcactttcaggaattattttgaacttaatcttacctaaagagaaaaaacaaaacaattaagatttacaaattaaggagggcgcttttatgaatcatttattatcaatggaacatttatctacagatcaaatatacaaacttatccaaaaggcaagtcaatttaaatctggtgaacgtcaactaccaaactttgaagggaaatatgtcgcaaatttattctttgaaaattctactcgaacaaaatgtagttttgaaatggcagaacttaagctagggttaaaaacgattagctttgaaacatcaacatcatctgtttcaaaaggtgaatctttatatgacacatgtaaaactttagaaagtattggctgtgatttattagtcattagacatccgtttaataactactatgaaaaattagcgaatattaacatcccaattgcgaatgctggtgatggtagtggacaacatccaacacaaagtttgcttgatttaatgacgatatatgaagaatatggatattttgaaggcttgaatgtattgatttgtggagacattaaaaattcacgtgtcgcacgtagtaattaccatagtttaaaagcattaggtgcaaacgtaatgtttaatagcccaaatgcttggattgatgattctttagaagcaccttatgtaaatatagatgatgttatagaaacagtagatatagttatgttattaagaattcaacatgaaagacatgggcttgcagaagaaactagatttgcagcagatgattatcatcaaaagcatggcttaaatgaagtgcgctataacaaattacaagaacatgctattgttatgcatccggcacctgtgaatagaggagtagaaatacaaagcgatttagtagaagcttcaaaatcaagaatttttaagcaaatggaaaatggcgtttacttaagaatggcagtcattgatgaattattaaaataggtaaggggacgaaaatgatgaaattaattaaaaacggtaaagtattacaaaatggcgaattacaacaagcagatattttaattgatggtaaggtaattaaacaaattgcacctgcaattgaaccaagcaatggtgttgacatcatagatgcgaaaggtcactttgtgtcacctggatttgtcgatgttcatgttcatttacgcgaacctggtggtgaatataaagagacaattgaaactggtactaaagctgctgctagaggcggatttacaactgtatgtccaatgcctaacacaagaccggtaccagattctgtagaacattttgaagctttacaaaaattaatcgatgacaatgctcaagtacgtgtattaccttatgcttcaattacaacacgtcaattaggtaaagaattggttgatttcccagcactagtaaaagaaggtgcctttgcgtttacagatgacggtgtaggagtacaaactgcaagcatgatgtatgaaggcatgattgaagctgcaaaagtaaacaaagccatcgtagcacactgtgaagataattcattaatctatggtggtgcaatgcatgaagggaaacgcagtaaagagttaggtataccgggtattccaaacatttgtgaatctgttcaaatcgcaagagatgtactattagctgaagcagcaggttgtcattatcatgtgtgtcatgtttctactaaagaaagtgttagagtcattcgtgatgctaaacgcgcaggcattcatgttacagctgaagttacaccacaccatttattgttaacagaagatgatattcctggtaacaatgccatttataaaatgaatccaccattgagaagtactgaagatagagaggctttgttagaagggttactagacggtacaattgactgtatcgcaacagaccatgcaccacatgcacgtgatgaaaaagcacaaccaatggaaaaagcaccattcggaattgttggtagtgaaacagcattcccattattatatacacattttgtgaaaaatggtgattggacattacaacaattagtagattacttaacaattaaaccatgtgagacatttaatttagaatacggcacattaaaagaaaatggttatgcagatttaacaatcattgatttagatagtgaacaagaaattaaaggtgaagatttcttatcaaaagcagataatacaccatttatcggctataaagtttatggaaatccgatcttaacaatggttgaaggcgaagttaaatttgagggggataaataatatgcaaagcaaacgttatctagtgttagaagacggttctttttacgaaggctaccgtttaggatctgataacttaactgtaggagaaattgtatttaatacagcgatgacaggttatcaagaaactatttcagatccatcatatacaggtcagatcattacttttacgtatccattaatcggtaattatggtatcaatagagacgattttgaatcattagtacctacattaaacggtattgtagtgaaagaagcgagtgcgcatccaagtaattttagacaacaaaagacacttcatgacattttagaattgcatcaaattccagggattgcaggtgttgatacaagaagtattacgcgtaaaattcgacaacacggtgtgttaaaagctggttttactgatcgaaaagaagatattgatcaacttgtcaaacatttacaacaagtagaattacctaaaaacgaagtagaaatcgtttcgactaaaacaccgtatgtttcgacaggtaaggatctaagtgtcgtacttgtagactttggtaagaagcaaaatattgttcgagaattaaacgtcagaggttgtaacgtcacagttgtaccatatacaactactgccgaagaaattttagcaatggctccagatggcgttatgctatcaaacggaccaggtaatcctgaagttgtagaatgtgcgattccaatgattcaaggaattttagggaaaattccgttctttggtatctgtctaggacatcaactttttgcattatctcaaggagcaagctcatttaaaatgaagtttggtcatcgtggtgcgaaccatccagttaaaaatttagagactggaaaaattgatattacgagtcaaaaccatggatatgcaatagatatagattcgttaaaaagtactgatttagaagttactcatcttgcattaaatgatggtactgtagaaggtttaaaacataaaacattaccagcattttctgttcaataccatcctgaagcaaatccaggaccgtcagattcaaactatctatttgatgattttgtagcaatgatgactaattttaaggaaaaggagcgtcatatcaatgcctaaacgtaatgatatcaaaacaatattagtaatagggtctgggccaattatcataggtcaagcagctgaatttgattatgctggaacacaagcatgtctagctttaaaagaagagggataccgagttattcttgtaaattcaaatccagcgacaatcatgactgataaggaaattgcggataaagtatatattgaaccgttaactcatgattttatagcgcgaattatacgtaaagagcaacctgacgctttacttccaactttaggtggtcaaacaggtttaaacatggcgattcaactacacgaaagtggtgtgcttcaagataataacgttcaattattaggaactgagctaacatcaattcaacaagcagaagaccgtgaaatgtttagaacattaatgaatgatttaaacgttcctgtgccagagagtgacattgtaaatacagtagagcaagcctttaaattcaaagagcaagtgggatacccgctaattgttagaccagcatttacgatgggtggtaccggaggcggtatttgtcataatgatgaagaattacatgaaatcgtctcaaatggtcttcattatagtccagcaacgcaatgtttattagaaaaatctatcgcaggttttaaagaaatcgaatacgaagtaatgcgtgataaaaacgataatgccatcgttgtatgtaacatggaaaatattgatccagttggtattcatacaggcgattcaattgttgtggctcctagccaaacattatcagatgttgagtatcaaatgttacgtgatgtttcattaaaagttattcgagctttaggtatcgaaggtggttgtaatgttcaattagcattagatccgcattcattcgattattatattatagaagtaaatccgcgtgtatcacgttcatcagcgttagcttcaaaagcaacaggatatcctattgcaaaattagcagctaaaatcgcggttggtctaacattagatgaaatgttaaatccaattacaggaacatcttatgcagcgtttgaaccaactttagactatgtgatttcaaaaataccaagatttccttttgataaatttgaaaaaggagaacgagagcttggcacacaaatgaaagcaacaggtgaagttatggccattggtcgaacttacgaagaatcattgttaaaagcaattcgatcacttgagtatggtgtgcatcacttaggattaccaaatggtgaaagcttcgatcttgattatattaaagaacgtatttcacaccaagatgatgaacgattatttttcatcggcgaagcaattagaagaggcacaacattagaagaaattcataatatgactcagatagattacttcttcttacacaagttccaaaacattattgatattgagcatcaactaaaagaacatcaaggtgatttagaatatcttaaatatgcaaaagattatggatttagtgataaaacaatagcgcatcgctttaatatgacggaagaagaagtatatcaattgcgtatggaaaatgatattaaacctgtatacaagatggttgatacttgcgcagctgaatttgaatcttcaacaccatattattatggtacatatgaaactgaaaatgaatccataattactgacaaagaaaaaatcttagtattaggctctggaccaattcgaatcggccaaggtgtagaatttgactatgcgacagttcacgccgtttgggcaattcaaaaagcagggtacgaagcgataattgtgaataacaatccagaaacagtatcaacagacttctcaatttctgacaaattatactttgaacctttaactgaagaagatgtgatgaatatcattaatttagaaaagcctaaaggtgtcgttgtacaatttggaggacaaacagcgattaatttagcagacaaattggctaaacatggtgttaaaatacttggtacttcactagaaaatctaaatcgtgctgaagatagaaaagaatttgaagcactattaagaaaaattaacgtgccacagccacaagggaaaacagctacatcacctgaggaagcattagcgaatgctgcagaaatcggatatccggttgtagtcagaccttcttatgtattaggtggtcgcgcaatggaaattgtagacaatgacaaagagttagaaaactatatgacccaggctgtaaaagcgagtccggaacatccggtattagtcgatagatatttaactggtaaagaaattgaagttgatgcgatttgtgatggagaaacggtcattattccaggaattatggaacatattgaacgtgctggtgtgcatagtggtgactcaatcgctgtatatccgccacaaactttgacagaagacgagttagcaacgcttgaggactatactataaaattagctaaaggtttaaacatcattggcttaatcaacattcaattcgttatagctcacgatggtgtgtatgttttagaagtaaatccacgttctagtagaacggtaccattcttaagtaaaattactgatattccaatggcacaattagctatgcgagcaatcattggggaaaaactaacagatatgggttatcaagaaggggttcaaccatatgctgagggtgtatttgtgaaagcaccggtatttagttttaataaattgaaaaatgttgatattactttaggacctgaaatgaagtctacaggtgaagtaatggggaaagatacaacattagaaaaggcgttattcaaagggttaacaggtagtggtgttgaagttaaagatcacggtacagtattaatgaccgtcagtgacaaagataaagaggaagttgttaaattggcacaacgcttaaatgaagttggctataaaattttagcaacgtctggaacagctaataaattagctgagtatgacatacctgcagaagtagtaggcaaaattggtggcgaaaatgatttattaacacgtattcaaaatggtgatgttcaaatcgttataaatacaatgactaaaggtaaagaagtagaaagagatggcttccaaattagacgtactacagttgaaaatggtattccatgtttgacatctttagatacagctaatgccttaacgaatgtaattgaaagtatgacatttacaatgcgtcaaatgtaaatcaatcaaactgtatcggtggggctgtaattaaccatttacttaaagaagtttatattacagcctcattattttaatgaatttcttaacgtaaagggagacatatatgatgaaagatttaccaattattgcattagattttgaatcaaaagaaaaagtaaatcaatttttagatttatttgatgaatcattattcgtaaaagtaggtatggaacttttttatcaagaaggtcctcaattaattaatgagataaaagaaagaggccatgatgtatttttagatttgaaactgcatgatattcctaatacagttggtaaggcgatggaaggactagctaaattgaatgttgatctggtaaatgttcatgctgctggtggcgtaaaaatgatgtctgaggccattaaaggattaagaaaacataatcaacatacaaaaattattgctgtaacacagcttacgtcaacaacagaagacatgttacgacacgaacaaaatatacaaacatcgattgaagaggccgttttaaattatgccaagttagcaaatgcagctggtttagatggcgttgtttgttcacctcttgaaagtcgtatgttgactgaaaagttaggtgcatcatttttaaaagtaacaccaggcattagacctaaaggggcatctcaagatgaccaacaccgtattacgacaccggaagaagcaagacagcttggttcgacgcatattgtagtcggtagaccgattacacaaagtgacaatccagtcgaaagttatcataaaattaaagaaagttggttagtataatggctaaagaaattgcaaaatcattattagatattgaagctgtaacattatcaccaaatgatttatatacatggagttcaggtattaaatcaccgatttactgtgataaccgtgttacgttaggttatcctttagttcgaggcgcaatccgcgatggtttaattaacttaattaaagaacactttcctgaagtagaagttatttctggtactgcaacagctggtattccacatgcagcttttattgctgaaaaattaaaattaccaatgaattatgttcgttcatcaaataagagtcatggtaagcaaaatcaaattgaaggtgctaaaagtgaaggtaaaaaagtagttgtgatagaagatttaatttcgacagggggatcttcagtcacagcagttgaagccttaaaacaagcaggtgcagaagtattaggtgttgtagctatctttacttacggtttgaaaaaagcagatgatacatttagcaatattcaactacctttttacactttaagtgattataatgaattaattgaagtagctgaaaatgaaggtaaaatttctagtgaagatatccaaacattagttgaatggagagacaacttagcataatatagacactagaaggaggaattcaacaaatgaatgacaaaacatctaatgatttatatgggaagataaaacattgtaacgaatttatcaatcattcaaatgattccaatctatctagtagtcacgatgtcgacgaaagttcaacgaagcaaaaacatataaaaaataaaacaactataaatcataatgatgatttatttaaacatgtaaaggatatattacgtaaacaaggacaaatttaaaaacaaaaaagctatagtgtttaatatcaggggctgcttaaccgcatccgaatattacaaacactatagcttttattatataaaaaatttattagcggataattaactttattaaaatccaaccaattaagaatacgagtaataggactaatactggaatcacataatgtaacataacgtccctcctttaacttaattttaattgtaatcaaatttgacaataagtcaaaacattaatacctatgataagtatcatttattaacatatgtatcatatttttaatcttgcgtaattttttatcgttaactatgtgatttaatcaacaggccaataagacgtttgtcattcgtgcacataacggtacgacgcgcttttgtcattttaattatgttaagataatagtagttatagaagttcaatctataggaggcatagcatggatattccaaaaatcacgacatttttaatgtttaataaccaagctgaagaagctgttaaactatacacaagcttatttgaagatagtgagattataacaatggctaagtatggtgaaaatggacctggtgatcctgggactgtacaacactcaatatttacattaaatggacaagtattcatggcgattgatgctaatagtggcacagaattaccaatgaatcctgcgatttcattatttgttacagtaaaagatactattgaaatggaacgactatttaatggattaaaagatgaaggtgccattttaatgccaaaaacgaatatgcccccatacagagagtttgcttgggttcaagataagtttggagtaagttttcaattagcattacctgagtaaaaggattcgtacagcgttgaatgataaagaaacactttttcttatgcatgcgttttacctatgtattcctattttaagtacacattatctgtggttgatgataaagaaccactacataataaatgattagtagttctttatcattttagtttcactcatttttaaaatcacaaagataatttgtaacttaaatgatgatgcgttattaaaaaacacgatacttcgtttcaatgaacgcattaaattaaaaataaacacctcgcaaaagaaagtagtcctttcttatggtgaggtgtttatttgtcgacaacttgattatgattgtttcattttttgaatatgttcataatcaggtgtagcatacaaagttttttgattatcatatgttacaaacccaggctttgcacctgatggtttgtgcacatttttaattaacgtgtaatcaacaggtatttgtccagaattaccagcttttgaaaaatatcctgctaacatagccgcttccttgattgtcgtatcgcttggtgcatcattaaatataacgacatgtgaaccaggaatatcttttgtgtgtaaccatgtgtaagtttttttagcttttttatttgttaaataatcattttgcttgttattcttgccaacatatatatcgtcgccatcagttgatacataatgttgtaattgaatctgctctttctttttcttagtttgatttttacgctgtttcataaagccttgttctgctaattcatctctaatttcatcaatgtcatggacagaaatatgatgtaattgttgttcgattgttgaaaaataatctatattgtctttcgtcaattgaatttgatgttgtaattcacgttctctcgttttcatacgattatattgtttataataatattgagcatttgcagatggggattttgtaggatttaaaggaatgacaacttcttcattcgtataataatttaatgccgtcacttctttatcgccttgcttaattcgatatatattagcagtgatcaattcaccatataactgttcagtatctttatttttagactgctcatattcttcaatcaacttcgctaatttattttgatatttgtgcaactgctgttgaacaaatcgaactaaatcattcgcacgttgtttaacgcgttcacgttcgccacgcgcatcataaaaacgatcaagtaaatcatttaatgaatcgtacgtaactgtatcatcattaaattgatttaactttataaaatagaaatcctctttacctgtttcatgatttttatgaaaaataggagtaggtggtaacttggtttctgccattacttcgtcgaatgcttctggtaatgttgatgaagtcataaattgacgacgattaacgatttcattcgtaattaaagggctaaatccttcaaactgattcaataattgtttagcaatattacctgcgttaaaatcgatatatttcaacacctctgcacctgtaatatcatacggattcattttgtgctgagtgggtggtgcttcataattaaaacctggcattactgtacgatagtgattcgtatttggtgttaagtgtttaaatccttcaattattttacgattttcatctactaaaattaagttactatgtttacccataatctcaaggatgacagtgcggtaaatagtatcgccaatttcatctttactctttatatcgatttcaatgcgacgatcattaccaatttgcttaatcgattcgataataccaccttctaagtgttttctaaaaacacgcgcaaacatgggtggattaaatggattatcatattttttagtagtcaattgtaatcttgaaaagtttggatggattgacaataacaattgatggttttgtctattttgacgtacaaccattagtattgtgtcattatcaggttgattgattttgtgaacgcgtcctgttattaaaaattgtagagactcaaccattttctttgtaaataagccatcataagccataatttatcttccaccttcttcatatcattcgtttcattttaacatgattgtaacttttcggtatagttattgaatcatacattatgccacacattttacattatctaaaagttcgcaattcaatttatttaattaaaattaatcgtgcaatataacgatattgttagacctaatagaaattatggcatgcaatttcaaatatgctatacaatataaagaacaatgtgatatcatatttaaataatagaagattagcttagagaggtcgtaaggcatggataatgaaaaaggattgttaatcgttttatcaggaccatctggagtaggtaaaggtactgttagaaaacgaatatttgaagatccaagtacatcatataagtattctatttcaatgacaacacgtcaaatgcgtgaaggtgaagttgatggcgtagattacttttttaaaactagggatgcgtttgaagctttaattaaagatgaccaatttatagaatatgctgaatatgtaggcaactattatggtacaccagttcaatatgttaaagatacaatggacgaaggtcatgatgtatttttagaaattgaagtagaaggtgcaaagcaagttagaaagaaatttccagatgcgttatttattttcttagcacctccaagtttagatcacttgagagagcgattagtaggtagaggaacagaatctgatgagaaaatacaaagtcgtattaacgaagcacgtaaagaagtcgaaatgatgaatttatatgattacgttgtagttaatgatgaagtagaacttgcgaagaatagaattcaatgtattgtagaagctgagcacttaaaaagagagcgcgtagaagctaagtatagaaaaatgattttggaggctaaaaaataatgttaaatccaccattaaaccaattaacgtcacaaattaaatcaaagtatttaattgcaacaactgcagcgaaaagagcgcgtgaaattgatgaacaacctgaaactgaattattaagtgaatatcattcatttaaaccagttggtagagcgttagaagaaattgctgacggtaaaattcgccctgttatttcaagcgattattatggtaaagaatagtttcgaccattaaaaatatgtgaagcaagacgtatatcaaacacgtcaaggcatatccaaatcaaacgcacctatataggtgtgtttttttagtttatccaatgattgatgttataataatactaaatttgtatctataaaaaagtaatgagcatttgtgcgcatatgatgatgtaaagcgtaaatgtcatagtgatatttaagggagattgaatatgaagaaaatattgttagccgttacaggtggcattgcggcatataaagcgattgatttgacaagtaagttaacacaatctgggtatgaagttcgcgttatgttaacgaatcacgcacaaaaatttgtgacaccattagcatttcaagcaataagtcgaaatgctgtttatacagatacttttatagaagaaaatccttcagaaatacagcatattgcattaggtgattgggcagatgcaatcattgttgcacctgcaacggcaaatacaattgcaaaattgagtgtaggtattgctgatgatttggtgacatcaacgttgctagcaacagagacaccgaaatttattgcgcctgctatgaatgtgcatatgtatgaaaataaacgtacgcagcaaaatattaatattttaaaagaagatgggtatcattttatcgaaccaggaagcggatttctagcatgtggttatgttgctaaaggacgtatggaagaaccgcttcaaatcgtttctgttattgatgctcattttcaaaatagtaatcgtttagctaatagttcatttcaagataaacgcgcattggttacagccggaccaactattgaagttatcgatccagtcagatttgtatccaatcgttcttctggaaaaatgggttatgcaatagctgaagcattgcgaaatcgaggagctatcgtgacattagttactggtcctacaacactagaggatccaaaagatattgaagttattcatgttcaaagtgctgaagaaatgtttgaacaagtgacaagccgatttgacgaacaagatattgttgtaaaagcagcagccgtatctgactatacaccggttgatgtattagaacataagatgaaaaagcaggatggtgatttgtcagtatcttttaaacgtactaaagacattcttaaatatttaggtgaacataaaacatcacagtatttaataggctttgcagcagagactgaagatattgaaaattatgcacaacaaaaattacgcaaaaaaaatgcagatgtgattatttcaaataatgttggggatatgtctatcggatttagttctgatgataatgaattgacaatgcattttaaaaataatgaaaaagtaaatatcaagaaaggaaaaaaagtagtattagctgcacaaattttagatgaactagaaactaggtggcaataatgatagcgaaagtcatagtcgatgtcgcgtcgaagagcgttgactataaatttgattatataattcccgaacaactcgaatctgtcatccaacctggtgtgcgtgtgattgtaccttttggaccaagaacgattcaaggttatgtaatggaagtaacagcagaacctgatgcacaacttgacgtttcgaagttaaaaaaaatcatagaagtgaaagatatacaaccagaattaacttcagaattaatagctttaagtgagtggatgggttcaactcatgtcattaaacgtatttctatgctagaagtgatgcttccgagtgctattaaagcgaagtataaaaaagcatttaagatgaaagatgacatagaggtaccttcaactttattacaaaaatttgataagcatggttactattattataaagatgcgcaaaaaaataatgatattcaattgcttatgaagttgttaaaagatgatattgttgaagaaaaaacgattctcacacaaaatataactaaaaaaaccaagcgtgctgttcgtgtcattgaagggtatcatcctgatgaagtattagctaagttggagaaagttattaaacaatacgatttgtatgcttacttgtctgaagaacaacataaaacaatatttttaactgatattgaggatatgggcttttcaaaatccagtttagatggacttatcaaaaaaggttatgttgaaaaatatgacgcggttgttgaaagagacccatttaaagatcgtgttttcgaacaagaatcaaaacagcaattaacagaagaccaatttaaagcatatgaagcgattaaagctaaaattgtaagccaagagcaagaaacatttttacttcatggtgtgacgggatcaggtaaaacagaagtatatttacaaacgatagaagatgttttaagccaaggaaaacaggcgatgatgttagttcctgaaatcgctctaacaccgcaaatggttttacgcttcaaacgtcgatttggtgatgacgttgctgtattacattctggcttatctaatggggaacgttatgatgagtggcaaaaaataagggatggtcgtgcgagagtaagtgttggtgcaaggtcaagtgtgttcgcacctttcaaaaatttagggttaatcatcattgatgaagaacatgaatctacatataagcaagaagattatccgagatatcacgctagagaaattgcccaatggcgaagtgaatatcatcactgcccagtcattttaggaagtgcaacaccatgtcttgaaagttatgcacgagctgaaaaaggtgtttatcatttgctatcattaccaaacagagtgaaccaacaagctttacctgaaattgatatcgtagacatgcgtgaagaattgagtgaaggtaatcggtcaatgttttcaaaagatttacgtgaagccatacaattaagattagatcgacaggaacaagttgttttatttttaaatcgacgtggttatgcatcatttatgttatgtcgggattgtggatatgtaccgcaatgcccaaactgtgatatttcattaacgtatcataaaacgacagacttattaaaatgtcactattgtggttaccaagagacaccaccgaatcaatgtccaaattgtgagagtgaacacattcgacaagtaggtactggtactcagaaagttgaagaactattgcaacaagaatttgaagatgcgcgcataattaggatggatgtagatacaacctcaaagaaaggtgcacatgaaaagttattgactgaattcgaaaaaggtaacggtgacattttactaggtactcagatgattgcgaaaggattagattatccaaacattactttagttggtgtgctgaatgcagatacaatgttaaatttacctgattttcgggcgagtgaacgtacttatcaactattaacgcaagtggctggtagagctggtcgtcatgaaaaggcaggtcaagtcatcattcaaacgtataatccagatcattattcaatattggatgttcaaaaaaatgattatttaacattttatcgtcaggaaatggaatatcgtaaattaggaaagtatccaccgtattattatttgattaatttcacaatctcacataaagaaatgaagaaggttatggaagcatcgcaacatgttcataaaattttattacagcatttaacagaaaaagcgcttgtactaggtccatctccggcagcacttgcgagaatcaacaatgaatttagattccaaattttagtgaaatataaaagtgaacctggattattacaagccattcaatttttagatgactattaccatgaaaaatttataaaagaaaaattagcattgaagattgatattgatccacagatgatgatgtaacattactaattattagaaacaagttcagtatgtacgagtatttgaaccagtctttgaatatttactttaagggcagaaaaagggcagaatatacaactgttaaccatttaaattagcagtttatattctgtctttttatatggctttataaattacgtgattttgattaggaatttattagtattttcatttacgaattatgattttaatgtaagtgccatacttactgataaataaaagtactaatgattaaacaaacaattttttaatggcaaattgaaatggtgcaaattttacacttataaattaatggctataaactattttatatctatctatgttttaactacttaaattattagacaaaacaattttcttaaattatcaattaaagtatttaaaaatattgatggttaatgtaaaatatcaatataaataagttttttaaatttatgtatgtttatttgattcaaacaaaataacttaagaggagaaagtttatgaaaaagacactgggatgtttacttttaattatgcttttagtcgtagcaggttgttcttttggtgggaatcataaattatcatcaaagaaatcagaagaatcaaaacaagaaactgtaaaaaaagaatcggaagaagagaaagacccagatttagagaaatttgaagaaatagagaagaaaatgaaaggaattaaagatgcgccatctctagataagttggatccattaatgacagaaaagtcgtttacgaatagtaaagggattcaaggatggaaagattacaaagaattaatgggtaaagtggaacttgcagattatagatttacaaaagattcaaaaggatcttctataaaagatgttgatgcattctttaaaggtaagaaaggtataaaaagaaaagtgattgaaacacacgatgatgtaaaacaagttgattattggtatgtagatccagatggaaagaaaattggcaattcaaacacacctgttttttacgcagaaattatgacaaaatataaagatggaaagttagtttatgcatcagtcgaaccaggttcttacgtaatacataaagatgatgcaattaaatatgacgattattctaagttaaaaaaattaagtcaactaactaaacttgatcatccaaaaccagttccatatagcgtagctcaaatcaaatctttcggagtgcctttaacaagcgtttcttttatgacgcatggatcaaaggatactaaagatgaagtgatgccggcattggcatatttcactttttcaccaaaaaattatgaagacaagtctaatccagatccaaaagttttaaatttagtaagtatggattttttaaatgcatctagtgattttggtaacgcacattttgttgttctaagtaaatatattaaagagtacgaatcaaactatgaaacagcgtcagatgattctttaaaatagtatttactgtgtagaaaataaatagtgtactacattaaataatcgcaataataatcccgataaacaatcagcattactgcttatcatatagagttcgtaataactataactctatgattcgcaattaataaatgattgtcatcgggatttatttttatccatttataaagtgacattaccttgttcatcagcaggtttgaaaacagtaatcactgcactaataattgctaaaatgtgtgggatacctgtccaacagaatattaagtgtagaataccttgcatatttttgccggcataaaatttatgaataccaaaactacctaagaacaatgctaataaaatataaataactttgtttacttgcatttctttccctccagttgaattgcttataatgacattagcttctctttttattatacccactttttgttcaaacattctagtttaagcattcccaatcatctaaatttcagttattcaatccttacaataaatttaggattacacttcagttgcattgtattattttacgtgtgaaatatacgtaatgaatcacatgacaatctttaaattgaaaaatatacattctatgatgtaaggtcgcatttttaatatatttacgttataatggtttgatgaattttattgaggagtaagagctatggcgattaaaaagttagtaccagcatcgcatcctattttaacgaaaaaagcgcaagcagttataaaatttgatgattcgttaaaaagattattacaagatttagaagatacaatgtatgcacaagaagctgctggcttatgtgcacctcaaattaatcagtcattgcaagtggcaatcattgatatggaaatggaaggattattacaacttgttaatccgaaaattataagtcaatcaaatgaaacaataacagacttagaaggttcaattacattgccagatgtttacggcgaagtgacaagaagtaaaatgatcgttgtcgaaagttatgacgtcaatgggaacaaagttgaactaactgcacatgaagatgtagcaagaatgattttgcatattatagatcaaatgaacggtatcccttttacagaacgtgcggaccgtattttaacagataaagaagtggaggcatattttataaatgactaaaataatatttatgggtacaccagacttttcaacaactgttttagaaatgcttattgcagaacatgatgtcattgcagtcgtaacgcaaccagatcgacctgttggacgtaaacgtgttatgacaccaccaccagttaaaaaagttgcaatgaaatatgatttacctgtatatcagcctgaaaaattaagtggttcagaagaattagaacaattgcttcaattagatgtagatttaattgtaactgctgcttttggacaattattacctgaatcattgttggcattaccaaaacttggcgcaattaatgtgcatgcatcattgttaccgaagtatagaggtggtgcaccaattcatcaggcaattatcgatggtgaacaagaaaccggcataacaattatgtatatgattaaaaaattagatgcgggtaatattatttcgcaacaagcaattaaaatagaagaaaatgataatgtcggtacgatgcatgataaattaagtgtattaggggcagatttattaaaagaaactttaccatctattatagagggcacaaatgaaagtgtacctcaagatgatacgcaagcaacatttgcttccaatattcgacgcgaagatgagcgaattagctggaataaaccaggaagacaagtgtttaatcaaattcgaggattatcaccatggccagttgcttatacaactatggatgacactaacttgaaaatatacgatgctgaactcgttgagactaataagataaacgagcccggaacaattatagaaacgactaaaaaagccattattgttgctacaaatgataatgaagctgttgcaattaaagatatgcaattggctgggaaaaagagaatgttagctgccaattatttaagtggtgcgcaaaacacactagtagggaagaaacttatatgatagaaaacgtgagaagtcttgcttttgacacgattcaagatatattaaatgaaggtgcgtatagtaacttgcgtatcaatgaagtgttgtcagaaaatgaattaaatgtaatggataaagctttatttacagaaattgtctacggaaccgttaaaagaaaatatacgttagatttttatttaaagccttttgtgaaaacaaagattaaggcatgggttaggcaattattatggatgagtatttatcaatatgtttatttagataaagttccaaatcacgccatcattaatgaagcagttgaaatagcaaaagaacgcggtggctatcacaacggaaatgtcgtaaatggcattttacgaacaatgatgcgtagtgacttacctgattttaatgaaattgcagatcctaaaaaaagaatggcaatcgagtatagtatgccgaagtggattatagatcattgggcaacacattatggtctcgaagaaactgaaacaattttacagtcatttttagaaacgacatcaacatctgtgcgtgccaacctgacgcgagcatcattagatgatattattgaaaagttgcaagacgaaggttatgacgttgaaaaagatcatgacttaccttattgtctccatataggaggacaaccaattattcattctcgttcatttaaagatggattcgtttcaattcaagataaaagctcaatgtttgttgcacacattatgaatgtagaccgacatgatcacgtattagatgcatgtagtgcacctggcggtaaggcttgtcacattgctgaagttttaatgccagaagggcaagttgacgcttcagatatacatgatcacaaaatagacttaattaattttaatataaaaaaattacgattaacaaatattaaagcttttcaacatgatgcgacaaaaccttatgataaaacatacgataagatacttgttgatgcaccatgtagcggattaggtgttatgagacataagcctgagattaaatatactcaaagcaaacaacatattgagtcactagttgatttacagcttgaaatattggaaaatgtaaaaaacaatgtaaaaataggtggcgaaatcgtctattcaacatgtactatagagcaactagaaaatgaaaacgtgatttatacgtttttgaaaaataataaaaacttcgaatttgaaccgtttcaacatccgataactggagagttggtcaaaacgttacaaatcatgccgcaagactttaattcagatggattctttatcactaagataaaaagaaaggacaattaggaatgataactgctgaaaagaaaaagaagaataaatttcttccaaattttgacaagcaatcaatatattcattgcgatttgacgaaatgcaaaactggctcgttgaacaaggtcaacaaaaatttcgagcgaaacagatttttgaatggttatatcaaaaaagagtagattcgattgatgaaatgacgaacttatcgaaagacttacgacagcttttaaaagataactttactgttacaactttaacaactgtagtaaaacaagaaagtaaagacggtacaattaaattcttatttgaattacaagatggctatacaattgaaactgttttaatgagacatgattatggaaattcagtatgtgtaacgacacaagtaggttgtcgtatcggatgtacgttttgtgcttctacacttggcggcttaaaaagaaaccttgaagctggcgaaattgtttcacaagttttaacagttcaaaaagcccttgatgctacagaagagcgcgtatctcaaattgtcataatgggtatcggtgaaccatttgaaaattatgatgaaatgatggactttttaagaatcgtcaatgatgataacagtttaaatattggtgcacgtcacattacagtatcaacatcaggtatcattcctagaatatatgactttgcggatgaagatatccaaattaattttgctgtaagcttacacgccgcaaaagatgaagtgcgatcacgcttgatgccaattaaccgtgcatataatgttgagaagttaatcgaagcaattcaatattatcaagaaaaaacaaatcgtcgtgttacttttgaatatggtctgtttggtggtgtgaatgaccaactagaacatgcaagagaattagcacatttaataaaaggcttaaactgccatgttaacttaattcctgtcaaccatgttccagaaagaaattatgtaaaaacggctaaaaatgatatctttaaatttgaaaaagaattaaagagactaggaattaatgccacaatacgtcgtgaacaaggttcagatattgacgcagcttgtggtcaattaagagcaaaggaacgacaagtagaaacgaggtaaagacaaatgctagaggcacaattttttactgatactggacaacatagagataagaacgaagatgcgggtggtattttttataatcaaactaatcaacaacttttagttctgtgtgatggtatgggcggccataaagcaggagaagttgcaagtaaatttgttacagatgagttgaaatcccgttttgaagcggaaaatcttatagaacaacatcaagctgaaaattggttgcgtaataacataaaagatataaattttcagttatatcactatgcacaagaaaatgcagaatataaaggtatgggtacaacatgtgtttgtgcacttgtttttgaaaaatcagttgtgatagcaaatgtcggtgattctagagcctatgttattaatagtcgacaaattgaacaaattactagtgatcactcgtttgttaatcatcttgttttaacgggtcaaattacgccggaagaagcatttacacatccacaacgtaatattattacgaaggtgatgggcacagataaacgtgtgagtccagatttgtttattaagcgattaaatttttatgattatttattattaaattcagatggattaactgattatgttaaagacaatgaaattaagcgtttgttagtaaaagaaggtacaatagaagatcatggggatcaattaatgcaattggcattagataaccattcgaaagataacgttactttcatactcgcggctattgaaggtgataaagtatgataggtaaaataataaatgaacgatataaaattgtagataagcttggcggcggtggcatgagtaccgtttatcttgcagaagatacgatacttaacattaaagttgcaattaaggcgatttttataccacctagagaaaaagaagaaacattaaaacgttttgaacgagaagtacataactcatcacagctatcacatcaaaatatagtaagtatgatcgatgttgatgaagaagatgactgttactacttagtaatggaatatattgaaggtccgactttgtctgagtatatagaaagtcatgggccattaagtgttgacacggcgattaattttacgaatcaaatattggatggcattaaacatgcacatgatatgcgtattgtacatagagatattaagccacaaaatatattaattgacagcaataaaacgttgaaaatatttgattttggaattgctaaagctttaagtgagacgtctttaactcagactaatcatgtgttaggtactgtgcagtacttttcaccagaacaagcaaaaggtgaggcaacggatgaatgtacagatatttattctataggtattgtgttatatgaaatgcttgttggtgaaccaccatttaatggagaaactgcagttagcattgcgattaaacatattcaggattctgtgccaaatgtgacaacagatgtacgtaaggatattccgcaatctttaagtaacgtcattttacgcgctacagaaaaagacaaagcgaatcgttacaaaacaattcaagaaatgaaagatgatttgagtagtgttttacatgaaaatcgagcgaatgaagatgtctatgaactcgataaaatgaaaacgatagcggtacctttgaaaaaagaagatctagcaaagcatattagtgaacataagtcgaatcaacctaaacgtgaaacgacgcaagtacctattgtaaatgggcctgctcatcatcagcaattccaaaagccagaaggtatgttgtatgaagcaaaacctaaaaagaaatcaacacgaaagattgtgctcttatcactaatcttttcgttgttaatgattgcacttgtttcttttgtggcaatggcaatgtttggtaataaatacgaagagacacctgatgtaatcgggaaatctgtaaaagaagcagagcaaatattcaataaaaacaatctgaaattaggtaaaatttctagaagttatagtgataaatatcctgaaaatgaaattattaagacaactcctaatacaggtgaacgtgttgaacgtggtgacagtgttgatgttgttatatcaaaaggccctgaaaaggttaaaatgccaaatgtcattggtttacctaaggagcaagccttgcagaaattaaaatcgttaggtcttaaagatgttaagattgaaaaagtatataataatcaagcgccaaaaggatacattgcaaatcaaagtgtaacggcaaatactgaaatcgctattcatgattctaatattaaactatatgaatctttaggcattaagcaagtttatgtagaagactttgaacataaatcctttagcaaagctaaaaaagccttagaagaaaaaggatttaaagttgaaagtaaagaagagtatagtgacgatattgatgagggtgatgtaatttctcaatctcctaaagggaaatcagtagatgaggggtcaacgatttcatttgttgtttctaaaggtaaaaaaagcgactcatcagatgtcaaaacgacaactgaatcggtagatgtaccatacactggtaaaaatgataagtcacaaaaagttaaagtttatattaaagataaagataatgacggttcaactgaaaaaggtagtttcgacattactagtgatcaacgtatagacattcctttaagaattgaaaaaggaaaaacagcaagttatattgttaaagtagacggtaaaactgtagctgaaaaagaagtcagctatgatgatatttaaatataattgaagtaaatgtaccgaggtttctatttagaagtctcggtatttttatattgagattgcggtagttttaaaatgcttcatgtcatcatatacaggtgagcattgtctataaattctgtttcactcccgcaatatttatatcatttgaaatgatcatttatatattaattttccagtctttgatataataaatgcagtaaaattaatcgagaggtgccattttgaagacaggtcgaatagtgaaatcaattagtggggtatatcaagtagacgttaatggcgaacgtttcaatacaaaaccacgaggattatttagaaagaaaaaattttcaccggtagttggagatatagtggaatttgatgtacaaaacattaatgaaggctatattcatcaagtgtatgagcggaaaaatgagttgaaaagaccacctgtaagtaatatagatacactagtaattgtgatgagtgctgtcgagccaaatttttcaacgcaattattagatcgatttttagttattgcacattcgtatcagttaaatgcgagagttttggtgactaaaaaagataaaacaccaattgaaaagcagttcgaaattaatgagttgttgaaaatatatgaaaatattggctatgagactgaatttattggaaatgatgatgatcgaaaaaaaatagtagaagcttggccagctggacttatagtacttagtggtcaatcaggtgtcggtaagtccactttcttaaatcattatcgtccagaacttaatcttgagacaaatgatatatcaaaatcattaaatcgaggaaagcatactacaagacatgtcgaactattcgaacgtcaaaacggttatattgcagacacacctggattcagtgctttaggttttgatcatatagataaagatgaaataaaagattattttcttgaattaaatcgatatggtgaaacatgtaagtttagaaattgtaatcatatcaaagaacctaattgtaatgttaagcatcaattagagatagggaatatttcgcaatttagatacgaccattatttacaactatttaatgaaatttcaaatagaaaggttagatattaaatgacaaaactatatccatcattattatctgttgattttttggatttacaacatgaattaaaacgacttgaagaagcaggtgtcgacggggttcattttgatgttatggatggtcaatttgtgcctaatatatctattggtttaccaatattagatgcagtaagaaaaggcacaacattacctatagacgtacatttgatgattgaaaatccagaaaagtatattgcatcatttgcagaacatggtgccgatatgatttcaattcatgtcgaatcaacgcctcatatccatcgtgctattcaaatgattaaacatttagataaaaaagctggtgtagtaattaatcctggtacaccaatatcacaaattgaacctattttagacattgttgattatgtactggtgatgacagttaacccagggtttggtggtcaatcatttattgatcaatgcgtagaaaaaatagcgggtcttaatgctattaaaatggaacgtcaattaaactttgatattgaagttgatggaggcgtaaataccgatactgcgaaagtatgtgttgaaaatggtgctacaatgctagtaacaggttcatttttctttaaacaagaggattataaaaaagtcacacaagcattgaaaggttgagtgtatatgcatataaatttattatgttctgatcgacacttgccgcaagatatttgggccaaaagtaatgaaggtaaatggggcggcgttgatagaggtgctttgattttattgaagcatcaaattatcccttttttctcagtgggagactttgattcagtcagtaaagaagaacgccaacttctaacagaacagttacaaatcaaacctgttcaagctgaaaaagctgatactgatttagctttagcggttgataaagctgttgcacttggatttgatagtattacaatttatggtgcaacaggcggacgattagatcacttttttggggcaattcagttattattgaaaaaagcatattataaacatgatgttcatatagaagttatcgatcaacaaaataaaattgaattattgcctaaaggtcaacatacagttgaaaaagataagagttatccgtacatttcatttataccgatgactgatgatgtagaactttctctagcaggttttaaatataatttagctagacaaatgcttaatataggttctactttaactatttcaaatgaaattgagtctttgcaagcgaaagtaattgtacatgatgggttgattttgcaaattagaagtacagatttaaattaagtatattcaaattaatgaggatttttaataaagtgcatgagtaatttaataaagtgacgtttatagatagaatttatagcataataatagatgaatcacgctgtaattaatgaagattatggcgtgatttattattgaaaggaaaattgtaggtcctagtacattgatttatgtgccaaaatcgatattgaacccataagtccaatttgacagagaagcattattaaacgttttaaccaaattatattagtatttcgaatttcactatgaaccattatgtattgttttgtaacaaaaaaagaactaagaggttgagctcttagttcttaagtaaatgcgtcctccacataaggtcacattttttatgtgcaatatatttattaaactctagttactttaccagattttaaagcacgtgcagaaacccaaacttttttaggtttaccgtcaactaggattctaactttttgaaggttagcgttccatctacgtttagtagagtttaaagcgtgtgaacgtctgttaccagtcgaagctttacgacctgttacgaaacattgtttacccatatgagtacctcctttaataaatataaatacacataactacttatatacttaactaagatagcatagtttcatttgaaaaacaatgaataattttcacataaaagtcaaaaatactgagttttgtgatataattgtagactgtgaagttatgtagtatgatattttagagaaataagtgaatgaaacatttaaactttttatttaatgatactacatctattaaaagaaaacgcctatagataatcgtcatgactgtaaattcagtttactcaaaatataataggtgatttaagcgtaagtcattctgataagttgtaccattgatattttataaaaataatcaatgaaacttaaagcgtttatgactacactaagtggtaaaattttaaaagtgattagggaaaacgaataataaactttgaaatttaggagggacaaagatatgacattagagatttcaaatgattacggtaaaattgatatttcaaacgaagtgattgcttcggttgtaggtggaaaggccgttgaatgttatggtattgtaggtatggcatctagacaacaagttagagatggtattgcggaaatactaggacatgaaaattatgctaaaggcatcaaagtaactgaaaataatggcgtagtggatatagatatgtacattattgtaagttacggtgtgaaaatatctgaagttgccaataatgtacaatcaacagtgaaatatactttggaaaaatcacttaatgtatcagtaaattcaatcaatatatatgtacaaggtgtacgtgtgaataatacaggcaagaaagcttaggaggacaacttgaaatgattagcaaaattaatggtaaattatttgccgatatgattatacaaggggcacaaaatttatctaacaatgcagatttggtagattctttgaatgtgtatccagtgccagatggtgatacaggaacaaatatgaatcttactatgacttcaggtcgcgaagaagtagagaataatttgtcgaaaaatatcggcgaattaggtaaaacattctcgaaaggtttactaatgggtgcaagaggtaactctggtgtcatcttgtcacaattattcagaggattttgtaaaaatattgaaagtgaatctgaaattaattcaaaattgttagctgaaagttttcaagctggtgttgaaacggcatataaagctgttatgaaaccagttgaaggtacaatacttacagttgcaaaagatgctgcgcaagctgcagtagaaaaagcaaataatactgaagattgtatagaattaatggagtacattattgtaaaagccaatgaatcacttgaaaacacaccaaacttattagctgtacttaaagaagttggtgttgttgatagtggtggtaaaggtttgttatgcgtttacgaaggattcttaaaagcgcttaaaggtgaaaaagttgaagccaaagttgcaaagctagataaagatgaatttgtacatgatgaacatgatttccatggtgtaattaatactgaagatattatttatggctattgtactgaaatgatggttcgttttggaaagaataaaaaagcctttgatgaacaagaattcaggcaagatatgagtcaatttggtgattctttattagtcattaatgatgaagaaattgtgaaagttcacgtgcataccgaatacccaggtaaagtgtttaattatggtcaacaatatggtgaattaattaaacttaaggttgaaaatatgagagaacagcaccgtgaagtgattcgaaaagagcagcacacagctaaaccgaaaatggaaacggttgaaacagcaattattactatttctatgggtgaaggtatttcagagatatttaaatcaatgggtgccacacatattattagtggtggacaaacgatgaatccttctacagaagatatcgttaaagtcattgaacaatcaaaatgtaaacgtgcaattattttgccgaataataaaaatatcttaatggcaagtgaacaagcagcgagtattgttgatgcagaagcagttgttattccaacgaaatctattcctcaaggtataagcgcactattccaatatgatgtggacgcaacacttgaagaaaataaagcgcaaatggctgattcagttaataacgttaaatctggttcattaacgtacgctgttcgtgatacgaaaattgatggcgttgagattaaaaaagacgcatttatgggcttaactgaagataagattgtaagtagccaaagtgatcaattaacaacggttactgagttgttaaatgagatgttagcagaagatagtgaaatattgactgtgattattggtcaagatgcagagcaaacagttacagataacatgataaactggatcgaagagcaatatccagatgtagaagtggaagttcatgaaggtggacaaccaatttatcaatatttcttttcagtagaataaaaatttaaaataaaaaactaccaatgataaatcatcagttggtagttttttattttgctattttagtgagatagcgggttaaaagtatcattctcgagttgctaacaatgtcatgttcaacttagtcatgataaaataaataacatactaaatgatacgtaaaatcaaataaaacataggtgatttattttggcgaaagtaaacttaatagaaagtccatattctcttttacaattaaaaggtataggtcctaagaaaatagaagtattgcaacaactaaatattcatacagtggaagatcttgttctttatttgccaaccagatatgaagataatacagtgattgatttgaatcaagcagaagatcaatctaacgttacgatagaaggacaagtatatagagctccagtagttgcattttttggaagaaataaatcaaaattaactgttcatttaatggtaaataatattgctgtcaaatgtatttttttcaatcaaccgtatttaaaaaagaaaatcgaattaaatcaaactataactgttaaaggtaagtggaatagggttaaacaggaaattactggtaatagggttttctttaattcacaaggtacacaaactcaagaaaacgcagatgttcaattagaaccagtctatcgtattaaggaaggtattaaacaaaagcaaatacgagaccaaattagacaagcattaaatgatgtgacaattcatgaatggttaactgatgaactaagagaaaaatataaattagagaccttggactttactttgaacacgttacatcatcctaaaagtaaagaggatttattacgtgctcgtagaacctatgcatttactgaactgtttttattcgaattacgtatgcaatggctaaatagattagaaaagtcatctgacgaagcaattgaaattgattatgacttagaccaagttaaatcatttattgatcgtttaccttttgaactaactgaagcacagaaatccagtgttaatgaaatttttagagatttaaaagcaccaatacgtatgcatcgattacttcaaggtgatgtaggttcaggaaaaacagtagttgctgcaatttgtatgtatgcgttaaaaacggctggttatcaatcagcattgatggtaccaactgaaattttagcagagcaacatgctgaaagtttaattgctttatttggagattctatgaacgttgcgttgttaactgggtcagtaaaaggtaagaaacgaaagatacttttagaacaacttgaaaatggtacgattgattgtttaattggaacccatgcattgattcaagatgatgtgattttccataatgttggtttagtaattacagatgaacaacatcgatttggtgtgaatcaacgccagcttttaagagaaaaaggtgcaatgacgaatgtgttatttatgacagcaaccccgataccaagaacactagcaatatcagtttttggtgagatggatgtgtcttcaattaaacaattaccaaaaggtcgtaaacctatcattactacttgggcaaagcatgagcaatacgataaagttttgatgcaaatgacctcagagttgaaaaaaggtcgtcaagcatatgtcatttgcccacttatagaaagttctgagcatctcgaagacgttcaaaatgttgtcgcattgtacgagtctttacaacagtattatggagtttcccgtgtaggattattgcatggtaagttgtctgccgatgaaaaagatgaagtcatgcaaaagtttagcaatcatgagatagatgttttagtttctactactgttgttgaagtaggtgttaatgtaccgaatgcaacttttatgatgatttatgatgcggatcgctttggattatcaactttacatcagttacgcggtcgtgtgggtagaagtgaccagcaaagttactgtgttttaattgcatctcctaaaacagaaacaggaattgaaagaatgacaattatgacacaaacaacggatggatttgaattgagtgaacgagacttagaaatgcgtggtcctggagatttctttggtgttaaacaaagtggattgccagatttcttagttgccaatttagttgaagattatcgtatgttagaagttgctcgtgatgaagcagctgaacttattcaatctggcgtattctttgaaaatacgtatcaacatttacgtcattttgttgaagaaaatttattacatcgcagttttgactaattgccatcctgatttgtcaatttaagtgcaacacttcgttaattgagtgatatgacacttgaactatttaaatgtaaagtggtattttaaaaatttataaattttcgactaaataatagctaaataatacagttatttgttgagtcggttaaatagaaagtgttatgatatgtgaggaatgtttaagactaggtactaaaaaatgaggggtgagacgttgaaactaaagaaagataaacgtagagaagcaatcagacaacaaattgatagcaatcccttcatcacagaccatgaactaagcgacttatttcaagtgagtatacaaacaattcgtttagatcgcacttatttaaacataccagaattaaggaagcgtattaaattagttgctgaaaagaattatgaccaaataagttctattgaagaacaagaatttattggtgatttgattcaagtcaatccaaatgttaaagcgcaatcaattttagatattacatcggattctgttttttataaaactggaattgcgcgtggtcatgtgctgtttgctcaggcaaattcattatgtgttgcgctaattaagcaaccaacagttttaactcatgagagtagcattcaatttattgaaaaagtaaaattaaatgatacggtaagagcagaagcacgagttgtaaatcaaactgcaaaacattattacgtcgaagtaaagtcatatgttaaacatacattagttttcaaaggaaattttaaaatgttttatgataagcgaggataaaattatggttaaattagcaattgatatgatgggtggcgacaatgcgcctgatatcgtattagaagccgtacaaaaggctgttgaagactttaaagatctagaaattatacttttcggtgacgaaaaaaagtataatctgaaccatgaacgaatcgaatttagacattgttctgaaaagattgaaatggaagatgagcctgttagagcgattaaacgtaaaaaagatagctcaatggtaaaaatggctgaagctgtgaaatctggtgaggcagatggatgtgtgtcagcaggtaatactggtgctttaatgtcagctggtttattcattgttggacgtattaaaggtgtagctagaccggctttagtagtaacattgccaacgattgatggaaaaggttttgtctttttagacgttggtgcaaatgcagatgctaaacctgaacacttattacagtatgcgcaactaggggatatttatgctcaaaaaattagaggtattgataatccgaaaatctcattattaaatataggtaccgagccagctaaaggtaatagtttaacgaaaaaatcatatgagttattaaatcaagatcattcattgaattttgttgggaatattgaagcgaagacattaatggatggcgatacagatgttgtagttaccgatggctatactgggaacatggtccttaaaaatttagaaggtactgcaaaatcaatcggtaaaatgttaaaagatacgattatgagtagtactaaaaataaattagcaggtgcaatattgaagaaagatttagccgaattcgctaaaaagatggattactcagaatacggtggttccgtattattaggattggaaggtaccgtagttaaagcacacggtagttcaaatgctaaagctttttattctgcaattagacaagcgaaaatcgcaggagagcaaaatattgtacaaacaatgaaagagactgtaggtgaatcaaatgagtaaaacagcaattatttttccgggacaaggtgcccaaaaagttggtatggcacaagatttatataacaacaacgatcaagcaactgaaattttaacttcagcagcaaacacgttagactttgatattttagagacaatgtttactgacgaagacggcaaattgggtgaaactgaaaacacgcaaccagctttattgacgcatagctcggcgttattagcggcgctaaaaaatttgaatcccgattttactatggggcatagtttaggtgaatattcaagtttagttgcagctgacgtattatcatttgaagatgcagttaaaattgttagaaaacgtggtcaattaatggcgcaagcatttcctactggtgtaggaagcatggctgcagtattgggcttagattttgataaagtcgatgaaatttgtaagtcattatcatctgatgacaaaataattgaaccagcaaacattaattgcccaggtcaaattgttgtttcaggtcacaaagctttaattgatgagctagtagaaaaaggtaaatcattaggtgcaaaacgtgtcatgcctttagcagtatctggcccattccattcatcgctaatgaaagtgattgaagaagatttttcaagttatattaatcaatttgaatggcatgatgctaagtttcctgtagttcaaaatgtaaatgcgcaaggtgaaactgacaaagaagtaattaaatctaatatggtcaaacaattatattcaccagtacaattcattaactcaacagaatggctaatagaccaaggtgttgatcattttattgaaattggtcctggaaaagttttgtctggcttaattaaaaaaataaatagagatgttaagttaacatcaattcaaactttagaagatgtgaaaggatggaatgcaaatgactaagagcgctttagtaacaggtgcatcaagaggaattggacgtagtattgcgttacaattagcagaagaaggatataatgtagcagtaaactatgcaggcagcaaagagaaagctgaagcagtagtcgaagaaatcaaagctaaaggtgttgacagttttgcgattcaagcaaatgttgccgatgctgatgaagttaaagcaatgattaaagaagtagttagccaatttggttctttagatgttttagtaaataatgcaggtattactcgcgataatttattaatgcgtatgaaagaacaagaatgggatgatgttattgacacaaacttaaaaggtgtatttaactgtatccaaaaagcaacaccacaaatgttaagacaacgtagtggtgctatcattaatttatcaagtgttgttggagcagtaggtaatccgggacaagcaaactatgttgcaacaaaagcaggtgttattggtttaactaaatctgcggcacgtgaattagcatctcgtggtatcactgtaaatgcagttgcacctggttttattgtttctgatatgacagatgctttaagtgatgagcttaaagaacaaatgttgactcaaattccgttagcacgttttggtcaagacacagatattgctaatacagtagcgttcttagcatcagacaaagcaaaatatattacaggtcaaacaatccatgtaaatggtggaatgtacatgtaatatatttgagctaaagctcattgacgcagtggttgactggtcatccaatggagaattgcctgacctagtcaactttgcgggggaaattctaagcaacctagataaggttccagaatttctccctaagaaacagtaatcaataaattgataagtagattagaggaacacttgagctaaagctcaagataaagacgtagtaatcaataaattgataactaataagcggaacgcctgagctaaagctcatgcataagaaacagtaatcaataaattgataactaataagcggaacgcctgagctaaagctcatgcctaagaaacagtaatcaataaattgataactgtttctaaaatttctacttgttttttagaatttaaaatgggaaaatataatagtctatgtataggcatttttaaaggaggtgaatcgacgtggaaaatttcgataaagtaaaagatatcatcgttgaccgtttaggtgtagacgctgataaagtaactgaagatgcatctttcaaagatgatttaggcgctgactcacttgatatcgctgaattagtaatggaattagaagacgagtttggtactgaaattcctgatgaagaagctgaaaaaatcaacactgttggtgatgctgttaaatttattaacagtcttgaaaaataataaatcttacatctgggtcgtcagtattgtcgactcagtttttttctttaattatcaatagttttaacgtaaaattaaagatgattcaagagcaacacataaaggagataaaataatgtctaaacaaaagaaaagtgagatagttaatcgttttagaaagcgctttgatactaaaatgacagagttaggctttacttatcaaaatattgatttataccaacaagcattttcgcattcgagttttattaatgattttaatatgaatcgtttagaccataatgagcgtttagagtttttgggtgatgcggtattagaattgacggtttcacgatatttatttgataaacatcccaacttgccagaagggaatttaacaaaaatgcgtgccactattgtatgtgagccctcacttgtaatatttgcgaataaaattggattgaacgaaatgattttacttggtaaaggtgaagagaaaacagggggacgtacaagaccatcattaatatcagatgcattcgaagcatttattggggcattgtatttggatcaaggactagatatagtttggaaatttgctgagaaagtcattttcccacatgtagaacaaaatgagttattaggcgtggtagattttaaaacacaattccaagaatatgtgcaccagcaaaataaaggtgatgtaacatataatttaataaaagaagaaggaccggcacatcatcgtctattcacttcagaagttattctgcaaggggaagcaatagctgaaggtaaagggaaaacgaaaaaagaatcagaacaacgtgctgctgaaagtgcctataagcaattaaagcaaattaaatagaaatttatatgatacgacatataggtgttcgatttaggatttatggaagaatttttaatattttatggaacaacctcgaaatttaatatacaaatactaaaatatcgtatacgtatgttctttaaaattgtgataaggagtttaggatggtttatttaaaatcaatagatgccattggatttaagtcttttgcagatcaaaccaatgttcaattcgataaaggtgtaactgcaattgttggtccaaatggaagcggtaaaagtaatattacagatgctattaaatgggtgttgggtgaacaatcggctaaatcattacgtggctcaaaaatggaagatattatcttctcaggtgcagaacatcgcaaagctcaaaattatgctgaagtacagttaagattagataatcattctaaaaagctcagtgttgatgaaaacgaagttattgtaacaagaagattgtatcgaagtggtgaaagtgagtactacataaataatgaccgtgcaagattaaaagatattgccgatttatttttagattctggattggggaaagaagcatatagcattatctcgcaaggtagagttgatgaaatactaaatgctaaaccaattgatagacgtcaaattattgaagaatcggctggtgtacttaaatataaaaaacgtaaagctgaatcattaaataaacttgaccaaacagaagataatttaacgagagtagaagacattttatatgatttggaaggtcgcgtagaacctctaaaagaggaggcagctatagctaaagaatataagacactttcgcaccaaatgaaacatagtgacattgtagttacagtgcacgatattgatcaatatacaaatgacaatagacaattagatcaacgtttaaatgatttacaaggtcaacaagcaaataaagaagctgacaagcaacgtttaagccaacaaattcaacaatataaaggtaaacgtcatcaacttgataatgatgttgaatcgcttaattatcaattagtaaaagctacggaagcctttgaaaaatatacgggacaattaaatgttttagaagaacgtaagaaaaatcaatctgaaacaaatgcacgatatgaagaagaacaagaaaatttaattgagcttttagaaaatatatcaaatgagatttctgaagctcaagatacttataagtctctgaaaagtaaacaaaaagaactcaacgctgtcattcgtgaattagaagaacaactatatgtttcagacgaagcgcacgatgaaaaattggaagaaattaaaaacgaatactatacattaatgtcagagcaatcagatgttaacaatgatattcgttttttaaagcatactatagaagagaatgaggctaaaaaatcaagactagattctcgattagttgaagtctttgagcaattgaaagatattcagggtcaaataaaaacgactaaaaaagaatatcaacagaccaacaaagaactttctgctgtagataaagaaattaaaaatatagaaaaagacctcactgatacaaaaaaagcacaaaacgaatacgaagagaaattgtatcaagcatatcgatataccgaaaaaatgaaaacacgtattgatagtttgacaacgcaagaggaagaatatacttattttttcaatggcgtcaaacatattttgaaagctaaaaataaagaattaaagggtattcatggtgcagttgcggaaattattgatgtgccatctaaattaactcaggcaattgaaacagcattaggtgcttcattacaacatgttattgtagattcagaaaaagatggacgccaggctattcaatttttaaaagaacgtaatttaggtcgtgcgacgtttttaccattaaatgttatacagagtagagtggtagcgactgatattaagtctattgctaaagaggcaaacggatttattagtattgcttcggaagcagttaaagtatcaccagaatatcaaaatattatcgggaatttattaggtaatacgattatcgttgatcatttaaagcatgcaaatgaattggcacgtgcgattaaatatcgaactcgtattgttactttggaaggtgatattgtaaatcctggtggttctatgactggtggtggcgctcgtaagtcaaaaagtattctgtctcaaaaagacgagttgacaacaatgagacaccaattagaagattacttgcgtcaaacagaatcatttgaacaacaatttaaagagttgaagataaaaagtgatcaattaagtgaactgtattttgaaaaaagtcaaaagcataatacacttaaagagcaagtgcatcattttgaaatggagctcgatagattaactacacaagaaacacaaataaaaaatgatcatgaagaattcgaatttgaaaaaaatgatggttatacgagtgacaaaagtcgacaaactttgagtgaaaaagaaactcatttagaaagtattaaagcatctttaaaacgactagaagatgaaattgaacgctacacaaaactttctaaagaaggtaaggaaagcgtaactaaaacacaacaaacgttacatcagaaacaatctgatcttgctgtggttaaagagcgtattaaaacacaacaacagacaatagatcgattaaataatcaaagtcaacaaaccaaacatcaattaaatgatgttaaagaaaaaattgcattctttaattcggatgaagtgatgggcgaacaagcttttcaaaatattaaagatcaaattaatggtcaacaagaaacgagaacacgcttatctgatgaattagataaattgaaacaacaacgtattgagttgaatgaacaaatcgatgcgcaagaagctacactacaagtttgtcaccaagatattttagctatcgaaaatcactaccaagatattaaagctgaacaatcaaaactagatgtattaattcatcatgcgatagatcatttaaatgatgaatatcaattgactgttgaacgtgcaaaatctgaatatacgagtgatgaatcgattgacgcattacgtaaaaaagttaaattaatgaagatgtcgattgatgaactaggtcctgtaaacttaaatgcaattgaacaatttgaagagttaaatgagcgttatacatttttaagtgagcaacgtacagatcttcgtaaagctaaagaaacattagagcaaattataagtgaaatggatcaagaggttactgaaagatttaaagaaactttccatgctattcaaggacattttacagctgtgttcaaacaattgtttggtggaggcgatgcagaattgcaattaactgaagccgattatttaacagctggtattgatattgtggtacaaccaccgggtaaaaagttgcaacatttatcgttactaagtggtggtgagcgtgcattaactgctattgctttactatttgcaattttaaaagtaagatctgcaccttttgttatattagatgaggttgaagctgcattagatgaagcgaatgttattagatacgcaaaatatttaaatgagttatcagacgaaacacaattcattgttattacacaccgtaaaggaacaatggaatttgcagataggttatacggtgtaacaatgcaagaatcaggtgttactaaacttgtgagtgtgaatttaaatacaatagatgatgtgttgaaggaggagcaataatgagcttttttaaacgcttaaaagataagtttgcaacaaataaagaaaatgaagaagttaaatccttaacagaagaacaaggtcaagataaattagaagatacacattctgaaggttcaacgcaggacgtaaatgatttagcagaaaatgctgaagtgaaaaagaagccacgcaagttgagtgaagcggattttgatgacgatggcttaatatcaattgaagattttgaagaaattgaagctcaaaaaatgggtgctaaatttaaagcaggactcgaaaaatctcgtcaaaatttccaagaacaattaaataatttgatagcgagatatcgtaaagtagatgaagacttttttgaagctttagaagaaatgttaatcactgcagacgtcggttttaatactgtgatgacgttaactgaagaattacgtatggaagcacaacgacgtaatattcaagatactgaagatttgcgtgaagtcattgttgaaaaaatcgtagagatttaccatcaagaagatgataattcagaagctatgaacttagaagatggtcgtttaaatgtcattttaatggttggtgtgaatggtgttggtaaaacaacaacaattggaaaattagcttaccgatataaaatggaaggtaaaaaagtaatgttagctgcgggcgatacttttagagcgggtgctattgatcaattgaaagtttggggcgaacgtgttggtgtagatgtaattagccaaagtgaaggttctgatccagctgctgttatgtatgatgcgattaatgccgctaaaaacaaaggtgttgatattttaatctgtgataccgctggacgtttacaaaataaaacaaatctaatgcaagaattagaaaaagttaagcgtgtaattaatcgagcagtgccagatgcgcctcatgaagcattactatgtttagatgctacaactggtcagaatgcgttgtcacaagctagaaactttaaagaagtaacaaatgttacaggtattgtattaacgaaattagatggtacagccaaaggtggtatcgtattagccattcgtaatgaattgcacattccagttaaatatgtaggattaggtgagcaattagatgacttacaaccatttaaccctgaaagttatgtctacggcttattcgctgatatgattgaacaaaatgaagaaataacaacagttgaaaatgatcaaattgtaacagaagaaaaggacgataatcatggggcaaaatgatttagttaaaacgttacgaatgaattatttgtttgatttttatcaatccttattgacgaataaacaacgtaattatttggaattattttatctcgaagattattctttaagtgaaatcgccgatacttttaatgtgagtagacaagcagtttatgataatataagaagaactggcgatttagttgaagattatgaaaagaaattggaattataccagaaatttgagcaacgccgagaaatatatgatgaaatgaaaaaacatttaagtaatccagaacaaatacaacgttatattcaacaattagaagacttagaatagatataaattgagggaggacatcgatatggcatttgaaggcttatcagaacgcctgcaagcgacgatgcaaaaaatgcgtggtaagggtaaacttactgaagctgatataaagataatgatgcgtgaagtaagattagcgttacttgaggctgacgtaaactttaaagtggtaaaagaatttattaaaacagtatcagaacgcgcattaggttccgatgtaatgcaatcattaacaccagggcaacaagttattaaaatagttcaagatgaattaacgaagttgatgggtggagaaaatacatcgattaatatgtcaaataaaccacctactgttgttatgatggttggtttacaaggtgctggtaaaacaacaactgcaggtaaattagcattattgatgcgtaaaaaatacaacaaaaaacctatgttagttgcagcagatatttatcgtccagcagcgataaatcaattacaaacagtagggaaacaaattgatattcctgtatacagtgaaggagatcaagtaaagccacaacaaattgtaactaatgcattaaaacatgctaaagaagaacatttagactttgtaatcattgatacagcaggtcgattacacatcgacgaagcattgatgaacgaattaaaagaagtaaaagacattgctaaaccaaacgaaattatgttagttgtcgattcaatgacgggtcaagatgctgtcaatgttgcagaatcttttgacgatcaacttgatgtcacaggtgttaccttaactaaattagatggtgatacacgtggtggtgcagctttatctattcgttcggtgacacaaaaaccaattaaatttgttggtatgagtgaaaagttagatggtttagagctattccatcctgaacgtatggcatcacgtattttaggtatgggtgatgtgttaagtttaattgaaaaagcgcaacaagatgtggatcaagaaaaagcaaaagatttagagaaaaagatgcgtgagtcatcatttactttagatgattttttagaacaacttgatcaggtgaaaaatttagggccgctggatgatattatgaaaatgattccaggtatgaataaaatgaaaggtctagataagcttaatatgagtgaaaagcaaattgatcatattaaagcgattatccagtcaatgacgccggctgaaagaaacaatccagacacattgaatgtatcacgtaaaaagcgtattgctaaaggttctggtcgttcattacaagaagtcaatcgtttgatgaaacaatttaacgatatgaagaaaatgatgaaacaattcactggtggcggtaaaggtaaaaaaggtaaacgcaatcaaatgcaaaatatgttaaaaggtatgaatttaccgttttaattattaatataaacaccaatctttatttcaacttaaggttggtgtttttgcattaataatattgtaattaaagttatttagagggacatgtacagttgtagtagtaccgttcatgtgaatataatgtttaattatatcattttgtataacttggtagtaaatgcattcaggaaaagtattaagcgtttcatcgagctaatttaatttttctagattttgggataaaatattcaataaatttctaggtaaagaaaaaactctttacaaacattcatacacctgttaatattatttcttgtagaaaataaaaattaaaacatgacttaaaggagattttataaatggcagttaaaattcgtttaacacgtttaggttcaaaaagaaatccattctatcgtatcgtagtagcagatgctcgttctccacgtgacggacgtatcatcgaacaaatcggtacttataacccaacgagcgctaatgctccagaaattaaagttgacgaagcgttagctttaaaatggttaaatgatggtgcgaaaccaactgatacagttcacaatatcttatcaaaagaaggtattatgaaaaaatttgacgaacaaaagaaagctaagtaatttagcgtaaaattgttctaacaataagaataactcgtttacactgacagtttttactcaatgatacgttgggaatatcacatgttagtaatatagaacgtattgggtaccataatggtgccctttttctttgaattattttcaattaaaatagaagtgttcaaagcatagagttggaggtaatagaatgagagttgaagttggtcaaattgttaacacacatggtattaaaggtgaaattaaagtaaaatccaattcagactttacagacgttcgttttcaacccggtcaagtgctgacagttgtgcataacaataacgaccttgaatatactgttaagtcacatagagtgcataaagggcttcatatgctcacatttgaaggtattaataatattaatgatattgagcatttaaaagggagttctatttatcaagagcgtgaccatgaagatatcgtacttgaggaaaatgaattttattattcagatattataggatgtacagtttttgatgatcaagaaacaccaataggtcgtgtaattaatatatttgaaacaggtgcgaatgatgtgtgggtgattaaaggatctaaagaatatttgattccttatattgctgatgttgtaaaagaagtggatattgaaaataaaaaaattatcatcacgccaatggaaggattgttggattaatgaaaattgattatttaactttatttcctgaaatgtttgatggtgttttaaatcattcaattatgaaacgtgcccaagaaaacaataaattacaaatcaatacggttaattttagagattatgcaattaacaagcacaaccaagtagatgattatccgtatggtggcggacaaggtatggtgttaaagcctgaacctgtatttaatgcgatggaagacttagatgtcacaaagcaaacacgcgttattttaatgtgtccacaaggcgagccattttcacatcagaaagctgttgaattaagcaaggctgaccacatggttttcatatgcggacattatgaaggttacgatgaacgtatccgaacacatcttgtcacagatgaaatatcaatgggtgactatgttttaacaggtggagaattgccagcgatgaccatgactgatgctattgttagactgattccaggtgttttaggtaatgagcagtcacatcaagatgattcattttctgatgggttattagagtttccgcaatatacacgtccgcgtgaatttaagggtctaacagttccagatgttttattgtctggaaatcatgccaatattgatgcatggagacatgagcaaaagttgatccgcacatataataaaagacctgacttaattgaaaaatatccattaactaatgcagataagcaaatattagaaagatataaaataggattgaaaaaaggttagtattgtgctaacataatctgagtgtggaaacacaaaaatcactatgatccgctgctatatatttgtcgaggcaagaacataggttgaagaggagaatttataatgacaaatcacaaattaatcgaagcagtaactaaatcacaattacgtacagacttaccaagtttccgtcctggtgatactttacgtgtacacgtacgtattattgagggtactcgtgagcgtatccaagtattcgaaggcgttgtaattaaacgtcgtggcggtggcgtttctgaaacgtttacagttcgtaaaatttcatcaggtgttggcgtggaacgtacattcccattacacacaccaaaaattgaaaaaatcgaagttaaacgtcgtggtaaagtacgtcgtgctaaattatattacttacgtagtttacgtggtaaagctgctagaatccaagaaattcgttaatcagcatttaaacaaagctatgtatgagtcatattcgactcaaacaacaaagccatctaggtcacttttatggagtgatatagatggctttttttgctgtttagttaatgtaaagttgataatgtaattgtttttcccttctttattcataacgtgtttgctcaaaatggttatataaacatgaggctgggacattaatcaatgttctatgctctacgaagttatattggcagtagttgactgaacgaaaatgcgcttgtaacaagcttttttcaattctagtcaggggccccaacacagaagctgacgaaaagtcagcttacaataatgtgcaagttggggtgggacgacgaaataaattttgcgaaaatatcatttctgttccactcccattaaatatatgcgtagcaacattatttttgtcttgcccatctcgtgaaaataatactacatataatgccaaatacagtaattgttataagtaaataatagtatggtggggtatagctcaattgaatctttgttatatttttaggtgctttaatgccggtcataacaccatttactttttcaactttaagactttgatcacctgatgtcgcttccataccttgattatatgctgttggcaaaacaatatacccagatgaatttttatttttagtaatagtataaccttgctttgtcttactaactttgacagcctctaatgaatttgaagcgtctttaagcgtggtataatcttcgccgtatatcccttttaaatttacacgatacttacctttaggcaatgataatctaatcctatctgaagctttaatgcgtatcgttacgggttttacaaagcgtcgatatttataagtgagtttatttctttcttgtgtatattcattcactttaacatcatgagctttatccggcgaaagtaattctaaatccatttcaaaatacaaatctttaaattgattagaaactgatcttggcaactgtacagttagaccaccattattttgtttaacttgtaataaatgttttgtaggagattgccaggctgcactatttaatttaattgttgaatctgatagtaaatttttattggctttaaaatgtgtattaacatctttagtattgttagaaacaatcccttgcaacattgcttgttctttatctaatggagattttaattctttattggaaaagaccttatttgcaatatgtgcacttggataatggatggtatttttagaatgaatccaacgaactttattgtctttgtgttcagagttaattttaaatccatatggtaagttgtcatcatgattcactctaattcgatcattaacattccaaagtgatagtaaattttgacgattgccaagtaacctataagtgctgtttttatcaattggcatattaatttggagtgtcttgtcataatattttaaaatgtctccattaaaaatactagaatataatgaaatgccattataatgatatataaatggtgaatttaatgcatagtctgacatataatcaatgcgattaaatgggcctgttgcattttgatttatcttttttataagctggtttacatagttactatggtaatcatgttgtttcaacgttgataatgattgttgataaggtttgattgccatatttttgttgttatctaaaatgacgatttgttgaatcataacgattaatactaatattgcaacggttaattttttataacgccataaactaaattttaaaataacggcaagcaccattagcaggataatacctactataagtgcgagtgggtgtgtcggtgatagtaatacataaagtaatgcgatgatgcttactggtattgttctgattaaataatatttcatatttaatgttgataaatgttgaataaacaatccgcaaagagcacttgatgatagtgctaagatatacacccaacgcctttctggaaatgaaaaaccattaaaagcactgtcgaaatactgtgataatgaaccaataaataatacccatgttactattgcgaaaagtctataaaagtaaaaacgatacagtttgaatgacaataatgcaacgatagtaagaattgaaatcgtaatgaaaaatccatcgctaaagaaaaaataatgataatcaagtggtgtcaaaatcggtatatcaacattgggattttgctttctgtcattttccaaaaacgcagaaatgccagtgaataaaccaaatacacttgataacacactcaaaactgtagcagatatgacgcaaattaatttttgtgttctagagacaatgtcatatttgtatgtgaaaatgagtcgatataaatagtagcaacctataataatagcttgataataactgaaataaaaattgctgaatagtgttagggctatcgcaacaatgaaaataccgattttgcgttgttgaaaatatctttccaaaccaagaatcgataatggcaataaatataataaatttccataaaatgaccaagtaaaattaaagtatataacgacagttgacatgccgtataaaatcgtagcgatcatatttgttgagcgtttaaagtgtaatattttaaataagtagaaggtcacgacaaatgttatgatagctcgtatcatagccataataagttggtttgtcggccaaaaatgtattgttgtcggattaaatataccaacagtttctcctattttaataaatagaaaatttagccacattaaaggtgacagcgaataataatatgatagtcctttcatataatcgccacctaatccaaacgatgcatcatataaactagaaaaactacttagatgctcatataaatacatttgaaatggcatcatttgacggaatccatctccagccccactaaaaacagtaccattcacaatatattcatagatatgagtagaaaataaaataagcgttaatattacgctcatgaaagttatgaccaagaattgtttgacgtttgaatttaaccatttttttaacacaacattatcctcaactttcaaatttaaaattaagtttaactgaaactaaagttaatgaggttctcgataggtaaagacaaagatgactgtggaacagataccttatcatagttacttaaactttggattatttttagtttatcattaaacaaatatattgaataataaaaatgtcatactgtattaattgaatatcacctaataagcagcttagatttattaaatgaaaatttttaattatagaaaacttggattaatcacttataccttaatctaaagcattgttaagaagtgtgacaatgttaaaataaatatagttgaattaatgaatttgttctataattaacaagttatagattttaataatgagaaaagaattgacgaaagtaaggtgaattgaatggttattcaatggtatccaggacatatggcgaaagccaaaagagaagtaagtgaacaattaaaaaaagtagatgtagtgtttgaactagtagatgcaagaattccatatagttcaagaaaccctatgatagatgaagttattaaccaaaaaccacgtgttgttatattaaataaaaaagatatgtctaatttaaatgagatgtcaaaatgggaacaattttttattgataaaggatactatcctgtatcagtggatgctaagcacggtaaaaatttaaagaaagtggaagctgcagcaattaaggcgactgctgaaaaatttgaacgcgaaaaagcgaaaggacttaaacctagagcgataagagcaatgattgttggaattccaaatgttggtaaatccacattaataaataaactggcaaagcgtagtattgcacagactggtaataaaccaggtgtgaccaaacaacaacaatggattaaggttggtaatgcattacaactattagacacaccagggatactttggcctaaatttgaagatgaagaagtaggtaagaagttgagtttaacaggtgcgataaaagatagtattgtgcacttagatgaagttgccatctatggtttaaactttttaattcaaaatgatttagcgcgcttaaaagcacattataaaatcgaagttcctgaagatgcagaaatcatagcgtggtttgatgcgatagggaaaaaacgtggcttaattcgacgtggtaatgaaattgattacgaagcagtcattgaactgattatttatgatattcgaaatgctaaaataggaaattattgttttgatatttttaaagatatgactgaggaattagcaaatgacgctaacaattaaagaagtaacgcagttgattaatgcggttaatacaatagaagaattagaaaatcatgaatgctttttagatgagcgaaaaggtgtacaaaatgccatagccagacgaagaaaagcgttagaaaaagaacaagctttaaaagaaaaatatgctgaaatgacttactttgaaaatgaaatattaaaagagaatcccaatgctattatttgtggtattgatgaagttggaagaggacctttagcaggtccagtcgttgcatgcgcaacaattttaaattcaaatcacaattatttgggccttgatgactcgaaaaaagtacctgttacgaaacgtctagaattaaatgaagcactaaaaaatgaagttactgcttatgcatatggtatcgcgacagctgaagaaatagatgaatttaatatttataaagctactcaaatcgccatgcagcgagctattgatggattatcagtacaaccaacgcatttattgatagacgcgatgacgcttgataatgcactgcctcaagtatctttaatcaagggtgatgcaagaagtgtatctattgcagctgcaagtatcatggcaaaggtttttcgtgatgattatatgacacagttatctaaagattatcctgaatatggttttgaaaaaaatgcgggttacggtaccaaacaacatttactagcaatcgatgatattggcattatgaaagagcatagaaaaagctttgaacctataaaatcgttactgtaaatcgtaaaattcaattaaatgataaaaaagtagcatttaagtttacaatagcgcttacattttttataattgtaagggaacttaacctaagtaacaggaggatggaagatgaatatccacgagtatcaaggtaaagaaatatttcgttcaatgggcgttgcagttccagaaggacgagtagcatttactgctgaagaagcggtggagaaagcaaaagaattaaattctgatgtatatgttgtaaaagcacaaattcatgctggaggtagaggtaaagcaggcggagtaaaaattgctaaatctttatctgaggtagaaacatatgcaaaagaattattagggaaaactttggtgacacatcaaactggtccagaaggtaaagaaattaagcgtttatatatcgaagaaggttgtactattcaaaaagaatattacgttggattcgttattgatcgtgcgactgaccaagtaacattgatggcgtctgaagaagggggcactgagattgaagaagttgctgcgaagactcctgaaaaaatcttcaaagaaactatcgatccagtaatcggactttcaccattccaagcaagacgaattgcgtttaatattaatattcctaaagaatctgttaacaaagctgctaaattcttattagcactttataatgtattcattgaaaaagattgttcaatcgtagaaatcaacccattagttacaacagctgatggtgatgtattggcattagatgctaaaattaattttgatgataatgcattattcagacataaagatgttgtagaattacgtgatttagaagaagaagatccaaaagagattgaagcgtctaaacatgatttatcatacattgcattagatggtgacatcggatgtatggttaatggtgcaggtttagccatggcaacaatggatacgattaatcatttcggtggaaacccagccaatttcttagatgcaggcggaagcgctactagagaaaaagtaactgaagcatttaaaatcattttaggtgatgaaaatgttaaaggtatttttgtaaacattttcggtggcattatgaaatgtgatgttatcgcagaaggtatcgttgaagctgtaaaagaagtagatttaactttaccactagttgtacgcttagaaggtacaaatgttgagttaggtaaaaaaatcttaaaagactcaggattagcaattgaaccagcagcaacaatggctgaaggtgcacaaaaaattgttaaactagtcaaagaagcataaggaaaggatgggagcactaagatgagtgtatttatagataagaatactaaagtaatggtacaaggtattacagggtctactgcccttttccatacaaaacaaatgcttgattatggtacgaaaatagtagcaggtgtgacgcctggtaaaggtggtcaagttgttgaaggcgttcctgttttcaacactgttgaagaagctaaaaatgaaactggggcaacggtttcagtcatttacgttccagcaccatttgctgcagactcaattttagaagcagctgatgcagacttagatatggttatttgtatcactgaacatattcctgtattagacatggttaaagttaaacgctacttacaaggtagaaaaacacgtttagttggtccaaactgtccaggtgtgattacagcagatgaatgtaaaattggtattatgcctggctatattcacaaaaaaggtcatgttggtgtagtatcacgttcaggtacactaacatatgaagcagtgcaccaattgactgaagaaggtattggtcaaactacagctgttggtattggtggagacccagtcaacggaacaaactttattgatgttttaaaagcattcaatgaagatgacgaaacgaaagcagttgttatgattggtgaaatcggtggtacagctgaagaagaagcagctgaatggattaaagcgaatatgacaaaaccagttgtaggctttatcggtggacaaacagcacctcctggaaaacgtatgggacatgctggtgcaatcatttcaggtggtaaaggtactgctgaagagaaaattaaaacattaaatagttgtggtgtgaaaacagcggcaacaccttcagaaattggttcaacattaattgaagctgctaaagaagcaggtatttatgaatcattattaacagttaataaataaagttaaaagatgatataaatggctatagcccattccgtactttataaaagtatcggaaatgggctatttgtcgtgcgatgaattttagtacacttttcatatttcggaaaggcaagttaattattttacctccttcaatagctttatataacaaagcaaatttttattaaaatatatagtgcactatgttataataacgatatattaaagtgggtttattgtataatgaataaacaacaaagtaaagtacgctattcaattagaaaagttagtattggaacatttttaaatggtgattatgatggaaaattaatgaagttccaaagtttagatcaaaactggaataatggtggatggcgtaaagcagaggttgcacacaaagttgttcataattatgaaaatgatatgatttttattagaccatttaaaaaagcataatttaaatcgaaggcaggacattgaaatatgaaattttcaactttaagtgaagaagaatttaccaactacaccaaaaagcacttcaaacattatacacagtctatagaattatataattatagaaataaaataaatcatgaagcacatattgtgggagtgaaggatgataaaaatgaagttatagctgcatgtttattaacagaggcacgtatttttaaattctacaaatatttctactctcatagaggtcctttacttgattatttcgatgctaaattagtttgttacttttttaaagaattatctaaattcatttataaaaatagaggagtatttattcttgttgacccatatttaatagagaatttaagagatgcaaacggtaggataataaagaattataataattcagtgatagtaaagatgctaggaaaaattgggtatctccatcaaggttatacaacaggatattcaaataaaagccaaattaggtggatttctgtattggatttaaaagataaagatgagaatcaacttttaaaagaaatggaataccaaactagaagaaatataaaaaagactattgagattggtgttaaggttgaagatttatctattgaagaaacaaatcgattttataaattgtttcaaatggctgaagaaaaacatggttttcatttcatgaatgaagattattttaaacgaatgcaagaaatatataaagataaggcaatgttaaagatagcttgtatagatcttaatgaatatcaagataaattaaaaatacaattattgaaaatcgaaaatgaaatgatgactgtgaacagagcattaaatgaaaatccaaattctaaaaagaataaatcaaaattaaatcagttaaatatgcaattatctagtattaataatagaattagtaaaaccgaagaactaatattagaagatggacctgttttggatttagctgctgctttatttatatgtactgatgatgaagtttattatctatcaagtggatcaaatcctaaatataatcagtatatgggagcatatcatctacaatggcatatgataaaatatgcaaaatcacataatattaataggtataatttttatggaataacaggcgtctttagtaatgaggcggatgattttggtgtacaacaatttaaaaaaggttttaatgcacatgttgaagaattaattggtgatttcatcaaaccagtaagaccaattctatataaatttgcaaaacttatttataaggtttgattataaagtatgttggaaattgaaatttaaaattctttccaacatacttttcactttttaagtcggtattttactccttaaaataacattacatcgacaatgtttttgtattagaaatgtaaaacaaaaatagaatatgattttgtatgattaaaaaaaggagttgatttattgattagactatttttgcttaagttatactgggcacacttttcgactaaacaaattcatcaatttttaatggcatatcctaatgtaattaaagaggggggcagaaaaaaagatagttatttatgtgaatgggtgaatagggaagaaaatgttcatttattacgtaaatactatgcttttataaaacttgatcataacgacattattaaagaactgcagaaattaaaagtaagttacattacatatatggatactgaatacccagtgctattaaaagaaatatatcaatttccattacttcttttctataaagggaacatcaaattaataaataatatgcatcatttggcagtagtaggtgcaagagattctacgagttatacccaacagtctttagaatttttattatcaaatgataaaagcaaatatttaacaattgtttccggccttgctcaaggagctgatgcaatggcacatcaaatagctttaaaatacaatctccctacaatagcagttttagcctttggccatcaaacacattatcccaaaagtacattagcattaagaaataaaatagaagaaaaaggtttagttatatccgaatatccgccacatacaccaattgctaaatatagatttcctgagcgtaatagaattatcagcggtttgtcaaaaggggttttaattactgaggctaaggaacaaagtggcagtcacatcacgatagattttgcattagagcaaaatagaaatgtttatgttttacctggatctatgtttaatcctatgacaaaaggtaatttattacgtatccaagaaggagctaaggtagtattaaacgctaatgatatatttgaagactactatatttaaaactaaaaataacgagttgcttcatatttcttttgttaccctttgtaatttattttttaataaaatctataaaaaatagacagggaaaatgatttgtttagatataaaacgttgacaaaagcaaaattaagcgtttatcatttatctttagtaattagattagcgagggggaaatgacattggcagataatttagtcattgttgaatcgcctgcaaaagcaaaaaccattgaaaagtatttaggtaagaaatataaagttatagcttcaatgggacacgtcagagacttaccaagaagtcaaatgggtgtcgacactgaagataattacgaaccaaaatatataacaatacgcggaaaaggtcctgttgtaaaagaattgaaaaaacatgcaaaaaaagcgaaaaacgtctttctcgcaagtgaccccgaccgtgaaggtgaagcaattgcttggcatttatcaaaaattttagagcttgaagattctaaagaaaatcgcgttgttttcaacgaaataactaaagacgctgttaaagaaagttttaaaaatcctagagaaattgaaatgaacttagtcgatgcacaacaagcgcgtcgaatattagatagattagttggctataacatctcgccagttctttggaaaaaagtaaaaaaagggttgtcagcgggtcgagttcaatctgttgcacttcgtttagtcattgaccgtgaaaatgaaattcgaaactttaaaccagaagaatattggactattgaaggagaatttagatacaaaaaatcaaaattcaatgctaaattccttcattataaaaataaaccatttaaactaaaaacgaaaaaagatgttgagaaaattacagctgcattagatggagatcaattcgaaattacaaacgtgactaaaaaagaaaaaacgcgtaatccagcaaatccatttacaacttctacattacaacaagaggcggcacgtaaattaaactttaaagctagaaaaacaatgatggtcgcacaacaattatatgaaggtatagatttgaaaaaacaaggtacgattggtttaataacatatatgagaactgattctacacgtatttcagatactgccaaagctgaagcaaaacagtatataactgataaatacggtgaatcttacacttctaaacgtaaagcatcagggaaacaaggtgaccaagatgcccatgaggctattagaccttcaagtactatgcgtacgccagatgatatgaagtcatttttgacgaaagaccaatatcgattatacaaattaatttgggaacgatttgttgctagtcaaatggctccagcaatacttgatacagtctcattagatataacacaaggtgacattaaatttagagcgaatggtcaaacaatcaagtttaaaggatttatgacactttatgttgaaactaaagatgatagtgatagcgaaaaggaaaataaactgcctaaattagagcgaggtgataaagtcacagcaactcaaattgaaccagctcaacactatacacaaccacctccaagatatactgaggcgagattagtaaaaacattagaagaattgaaaattgggcgaccatcaacttatgcaccgacaatagatacgattcaaaagcgtaactatgtcaaattagaaagtaagcgttttgtacctactgagttgggagaaatagttcatgaacaagtgaaagaatacttcccagagattattgatgtggaattcacagtgaatatggaaacgttacttgataagattgcagaaggcgacattacatggagaaaagtaatcgacggtttctttagtagctttaaacaagatgttgaacgtgctgaagaagagatggaaaagattgaaatcaaagatgagccagccggtgaagactgtgaagtttgtggttctcctatggttataaaaatgggacgctatggtaagtttatggcttgctcaaacttcccggattgtcgtaatacaaaagcgatagttaaatctattggtgttaaatgtccaaaatgtaatgatggcgacgtcgtagaaagaaaatctaaaaagaatcgtgtcttttatggatgttcgaaatatcctgaatgcgactttatctcttgggataagccgattggaagagattgtccaaaatgtaaccaatatcttgttgaaaataaaaaaggcaagacaacacaagtaatatgttcaaattgcgattataaagaggcggcgcagaaataatatttttatttcctagagacattttaagaatgttaaatagaatcattagtgaatcttattttaaagatagtaatggattaatctaaataagtgcggataatataaacataacaacataattaaaagacataaatgacaataaaaggagtatagaaatgactcaaactgtaaatgtaataggtgctggtcttgccggttcagaagcggcatatcaattagctgaaagaggaattaaagttaatctaatagagatgagatctgttaaacaaacaccagcgcaccatactgataaatttgcggaacttgtatgttccaattcattacgcggaaatgctttaactaatggtgtgggtgttttaaaagaagaaatgagaagattgaattctataattattgaagcggctgataaggcacgagttccagctggcggtgcattagcagttgatagacacgatttttcaggttatattactgaaacactcaaaaatcatgaaaatatcacagttattaatgaagaaattaatgccattccagatggatacacaattatcgcaacaggaccacttactacagaaacgcttgctcaagaaatagtggacattactggtaaagatcaactttatttctatgatgcagctgctccaattattgaaaaagaatctattgatatggataaagtttacttaaagtcccgttatgataaaggtgaagctgcatatttaaactgtcctatgactgaggatgaatttaatcgcttttatgatgcagtattagaagctgaagttgcgcctgtaaattcatttgaaaaagaaaaatatttcgagggttgtatgccttttgaagtaatggcagaacgcggacgcaagacattactatttggaccaatgaaaccagtaggattagaagatccaaagacggggaaacgtccttatgcagtggttcaattaagacaagatgacgctgctggcacactctacaatattgttggcttccaaacgcatttaaaatggggagctcaaaaagaagttattaaattaattccaggtttagaaaatgttgatattgttagatatggtgtgatgcatagaaataccttcattaactcaccggacgtattaaacgagaaatatgaattgatttcacaaccaaacatacagtttgcgggacaaatgactggtgttgaaggttatgtagaaagcgcagctagcggcttagttgcaggcatcaatcttgcgcataaaatattaggcaaaggtgaggtagtatttccgagagaaactatgattggaagtatggcttactatatttctcatgctaaaaacaataagaatttccaacctatgaatgctaacttcgggttattaccatctttagaaactagaattaaagataaaaaagaacgctatgaagcacaagctaatagagctttggattacttagaaaatttcaaaaaaactttataaaatagttagaaagactagatatgctattcattcttaagtcatcaacgagtaagtaatgactttctaaatggaaaatacttatcctagtctttttaattttggaattgttacgtatttctgacaattgagaattcgtattcaaaaaatatctaaataaataacacgcaataagttgattgatgtaacatgtaagagaatgttttaaataaactttatttaaaagacaatgaaataataaatggcaaggctattaataaagacttttagtaattaatttaaaaaagaggtattctaattaacaggttttccgattagttacaattatttaattctcaaaagatttagaattgattatcaaattactgtaagccctttgctgtatatgctacaattcttattgatggagggtaaatgtattgaatcatattcaagaagcgtttttaaatacattgaaagttgaacggaatttttcggaacacacattgaaatcatatcaagatgacttaattcagtttaatcaatttttagaacaagaacatttacagttgaatacttttgaatacagagatgctagaaattatttgagctatttatattcaaatcatttgaaaagaacatctgtttctcgtaaaatctcaacgttaagaactttctatgaatattggatgacgcttgatgagaacattattaatccatttgttcaattagtacatccgaaaaaagaaaaatatcttccgcaattcttttacgaagaagaaatggaagcgttatttaaaactgtagaagaggacacttcaaaaagtttacgggatcgagttgttcttgaattgttatatgctacaggcatccgtgtttcggaattagttaatattaaaaaacaagatatagatttttacgcgaatggtgttaccgtattaggaaaagggagcaaagagcgttttgtaccgtttggtgcttattgtagacaaagcatcgaaaattatttagaacatttcaaaccaattcagtcatgcaatcatgattttcttattgtaaatatgaagggtgaagcaatcactgaacgcggtgtacgatatgttttaaatgatattgttaaacgaacagcaggcgtaagtgagattcatccccacaagctcagacatacatttgcaacgcatttattgaatcaaggtgcagatctaagaacagtacaatcgttattaggtcatgttaatttgtcaacaactggtaaatatacacacgtatctaaccaacaattaagaaaagtgtatctaaatgcacatcctcgagcgaaaaaggagaatgaaacatgagtaatacaacattacatgcaacaacaatttatgctgtaagacataatgggaaagcagctatggctggagatgggcaagtaacgcttggtcaacaagtcatcatgaaacaaacggcaagaaaagtgcgacgtttatatgaaggtaaagtgttagctggtttcgcaggtagtgtagcagatgcgtttacgttatttgaaaaattcgaaacaaaattacaacagtttagtggtaacttagaaagagctgctgttgaattggcacaagaatggcgaggcgataaacaattacgtcaattagaagctatgctaattgtaatggataaagatgctattttagttgtcagtggaactggcgaagttattgccccagatgatgaccttatcgctattggatcaggaggcaactacgcattaagcgcaggacgtgcattgaagcgccatgcatcgcatttgtctgctgaagaaatggcatatgagagcttgaaagtagcggctgatatttgtgtctttaccaacgataatattgttgtcgaaacactataataatcagagcacgataaataattacgagcaattaattttagttaaaagacggaggaatgaaattaatggatacagctggaataagattaactccaaaagaaatcgtatctaaattaaatgaatacatcgttggacaaaatgatgctaaacgtaaagtggcaattgccctacgtaatcgatacagaagaagtttattagatgaggaatcaaagcaagaaatttcacctaaaaatattttgatgattggaccaaccggcgttggtaaaactgaaattgcaagaagaatggccaaagttgtcggcgcgccatttataaaagtagaagctactaaatttactgaggtaggttatgtaggacgagatgttgaaagtatggttagagatcttgttgatgtttcagtaagattagtcaaggcgcagaaaaaatcattggtacaagatgaagcaacagctaaggccaatgaaaaacttgttaagttattagttccaagtatgaaaaagaaagcgtctcaaacgaataatcctttagagtcacttttcggaggtgcaattccaaatttcggacaaaataacgaagatgaagaagaaccacctactgaggaaattaaaacaaaacgttctgaaattaagagacaattagaagaaggcaaacttgaaaaagaaaaggtaagaattaaagtcgaacaagatcctggtgctttaggtatgctaggtacaaatcaaaatcagcaaatgcaagagatgatgaatcaattaatgcctaaaaagaaagttgagcgagaagttgctgttgagacggcaaggaaaatcttagctgatagttatgcggatgaactaattgatcaagaaagcgctaaccaagaagcgcttgaattagcagaacaaatgggtatcatctttatagatgaaatcgacaaagttgcgacgaataatcataatagtggtcaagatgtctcaagacaaggtgttcagagagatattttacctatacttgaaggtagcgttattcaaaccaaatatggtactgtgaatactgaacatatgctgtttataggtgctggagctttccatgtatctaagccgagtgacttgataccagaattgcaaggtcgttttccgattagagtggaacttgatagtttatcggtagaagattttgtaagaattttgacagaaccaaaattgtcattaattaaacaatatgaagcattgcttcaaacagaagaagttactgtaaactttacggatgaagcaattactcgcttagctgagattgcttatcaagtaaatcaagatacagacaacattggtgcacgtcgacttcatacaattttagaaaagatgttagaagatttatcattcgaagcaccaagtatgccgaatgcagttgtagatattactccacaatatgttgatgataaattaaaatcaatttcaacaaataaagatttaagtgcatttattctataaaaatatacaaaaggagaaaaattcatgagcttattatctaaaacgagagagttaaacacgttacttcaaaaacacaaaggtattgcggttgattttaaagatgtagcacaaacgattagtagcgtaactgtaacaaatgtatttattgtatcgcgtcgaggtaaaattttaggatcgagtctaaatgaattattaaaaagtcaaagaattattcaaatgttggaagaaagacatattccaagtgaatatacagaacgattaatggaagttaaacaaacagaatcaaatattgatatcgacaatgtattaacagttttcccgcctgaaaacagagaattattcatagatagtcgtacaactatcttcccaattttaggtggaggagaaagattaggtacattagtacttggtcgagtacatgatgattttaatgaaaatgatttggtactaggtgaatatgctgctacagttattggtatggaaatcttacgtgagaagcatagtgaagtagaaaaagaagcgcgcgataaagctgctattacaatggcgattaattcattatcttattctgaaaaagaagcaattgaacatatctttgaagaacttggcggtacggaaggcctattaatcgcatcaaaagttgcagatagagttggtattactagatctgtaattgtaaatgcactacgtaaattagaaagtgctggtgtaattgagtcacgttctttaggaatgaaaggtactttcattaaagttaaaaaagaaaaattcttagatgaattagaaaaaagtaagtaagtcgatgagtctgggacataattcaatgtcctagtcgtaacgatgttatcttggcagtagtcaacgaaatgactttgatgattatgttgaagtcatttctttatttttgtctaattttcaatcaaattgatattccacattaacatgatagaattacctttaaatttatgaaaaaatgcttgaaaaacatttgctttagacacggcattatgttatatttattttcggctataaagccaatacacacatatcaaacgtgattgtgtaaagggtgcaatatttgtatattgtctttacaatagtttgctatggaggtaattaaccaataggaggaatttataatggcagtaatttcaatgaaacaattactagaagcgggtgttcacttcggtcaccaaacacgtcgttggaacccaaaaatgaaaaaatatatcttcactgagagaaatggtatttatatcatcgacttacaaaaaacagtgaaaaaagtagacgaggcatacaacttcttgaaacaagtttcagaagatggtggacaagtcttattcgtaggaactaaaaaacaagcacaagaatcagttaaatctgaagcagaacgtgctggtcaattctacattaaccaaagatggttaggtggattattaactaactataaaacgatctcaaaacgaatcaaacgtatttctgaaattgaaaaaatggaagaagatggtttattcgaagtattacctaaaaaagaagtagtagaacttaaaaaagaatacgaccgtttaatcaaattcttaggcggaattcgtgatatgaaatcaatgcctcaagcattattcgtagttgacccacgtaaagagcgtaatgcaattgctgaagctcgtaaattaaatattcctatcgtaggtatcgttgacactaactgtgatcctgacgaaattgactacgttatcccagcaaacgacgatgctatccgtgcggttaaattattaactgctaaaatggcagatgcaatcttagaaggtcaacaaggcgtttctaatgaagaagtagctgcagaacaaaacatcgatttagatgaaaaagaaaaatcagaagaaacagaagcaactgaagaataatcaactgttgaatctgacttagatatagtttaaatgggtgataagatattaatgcttatcaccttttttaaaaagaaaatcgaggcaaattacaaatattcaattagagtattggcaatcttgcctataataatgctaaaatcataatatataaaatgataacttattggaggaataatgaatggcaactatttcagcaaaacttgttaaagaattacgtgaaaaaactggcgcgggtatgatggattgtaaaaaagcgctaactgaaactgatggtgacatcgataaagcgattgattacctacgtgaaaaaggtattgctaaagcagctaaaaaagcagaccgtattgcggctgaaggtttagtacatgtagaaactaaaggtaacgacgcagttatcgttgaaatcaactctgaaacagactttgttgctcgtaacgaaggtttccaagagttagttaaagaaatcgctaatcaagtattagatacaaaagctgaaactgttgaagctttaatggaaacaactttaccaaatggtaaatcagttgatgaaagaattaaagaagcaatttcaacaatcggtgaaaaattaagtgttcgtcgttttgctatcagaactaaaactgataacgatgctttcggcgcttacttacacatgggtggacgcattggtgtattaacagttgttgaaggttcaactgacgaagaagcagcaagagacgttgctatgcatatcgctgcaatcaaccctaaatatgtttcttctgaacaagttagcgaagaagaaatcaaccacgaaagagaagttttaaaacaacaagcattaaatgaaggtaaaccagaaaacatcgttgaaaaaatggtggaaggacgtttacgtaaatacttacaagaaatttgtgctgtagatcaagacttcgttaaaaaccctgatgtaacagttgaagctttcttaaaaacaaaaggtggaaaacttgttgacttcgtacgctatgaagtaggcgaaggtatggaaaaacgcgaagaaaactttgcggatgaagttaaaggacaaatgaaataatctgtcataaagtaaaacaaggaagaagacacctttaatgttgctttattaaaatgtaaatcattctaataaaacaacaactgtgtcttctttacttgtatatgttacatatattcacgatagagaggataagaaaatggctcaaatttctaaatataaacgtgtagttttgaaactaagtggtgaagcgttagctggagaaaaaggatttggcataaatccagtaattattaaaagtgttgctgagcaagtggctgaagttgctaaaatggactgtgaaatcgcagtaatcgttggtggcggaaacatttggagaggtaaaacaggtagtgacttaggtatggaccgtggaactgctgattacatgggtatgcttgcaactgtaatgaatgccttagcattacaagatagtttagaacaattggattgtgatacacgagtattaacatctattgaaatgaagcaagtggctgaaccttatattcgtcgtcgtgcaattagacacttagaaaagaaacgtgtagttatttttgctgcaggtattggaaacccatacttttctacagatactacagcggcattacgtgctgcagaagttgaagcagatgttattttaatgggcaaaaataatgtagatggtgtatattctgcagatcctaaagtaaacaaagatgcggtaaaatatgaacatttaacgcatattcaaatgctccaagaaggtttacaagtaatggattcaacagcatcctcattctgtatggataataacattccgttaactgttttctctattatggaagaaggaaatattaaacgtgctgttatgggtgaaaagataggtacgttaattacaaaataaatttagaggtgtaaaataatgagtgacattattaatgaaactaaatcaagaatgcaaaaatcaatcgaaagcttatcacgtgaattagctaacatcagtgcaggaagagctaattcaaatttattaaacggcgtaacagttgattactatggtgcaccaacacctgtacaacaattagcaagcatcaatgttccagaagcacgtttacttgttatttctccatacgacaaaacttctgtagctgacatcgaaaaagcgataatagcagctaacttaggtgtcaacccaacaagtgatggtgaagtgatacgtattgctgtacctgccttaacagaagaacgtagaaaagagcgcgttaaagatgttaagaaaattggtgaagaagctaaagtatctgttcgaaatattcgtcgtgatatgaatgatcagttgaaaaaagatgaaaaaaatggcgacattactgaagatgagttgagaagtggtactgaagatgttcagaaagcaacagacaattcaataaaagaaattgatcaaatgattgctgataaagaaaaagatattatgtcagtataaaactaatatacaatgacatattaaaatgccagtattaaacgataatgtaacatttaaaatgggcatgtttaattaaatcaaaaatgcatgtgataatttaaattcacaatgagcataaaaatggtgtttaaacaagttaattaaacatatactttataaataataggcatcaggtatattgctataataaagttatgtaatttttaacctcagtatgtatgtcacatttctggtgtaaactgtaccgagtcagactttggtacagtttttttatttgcttattcaatgcattaaatgagtatgataaaatgataatgattgtttagtaacttatactatatgacagagatgatcaggctcggaggaaagaccatgtttaaaaagctaataaataaaaagaacactataaataattataatgaagaattagactcgtctaatatacctgaacatatcgctattattatggatggtaatgggcgatgggctaagaagcgaaaaatgcctagaattaaaggtcattacgaaggtatgcaaacaataaaaaaaattactagggtagctagtgatattggtgttaagtacttaactttatatgccttttccactgaaaattggtcaagacctgaaagtgaagtaaattatattatgaatttgcctgtcaatttcttaaagacatttttaccggaactaattgaaaaaaatgtcaaagttgaaacaattggatttactgataagttgccaaaatcaacgatagaagcaataaataatgctaaagaaaagacagctaataataccggcttaaaattaatatttgcaattaattatggtggcagagcagaacttgttcatagtattaaaaatatgtttgacgagcttcatcaacaaggtttgaatagtgatatcatagatgaaacatatataaacaatcatttaatgacaaaagactatcctgatccagagttgttaattcgtacttcaggagaacaaagaataagtaatttcttgatttggcaagtttcgtatagtgaatttatctttaatcaaaaattatggcctgactttgacgaagatgaattaattaaatgtattaaaatttatcagtcacgtcaaagacgctttggcggattgagtgaggagtagtatagtatgaaagttagaacgctgacagctattattgccttaatcgtattcttgcctatcttgttaaaaggcggccttgtgttaatgatatttgctaatatattagcattgattgcattaaaagaattgttgaatatgaatatgattaaatttgtttcagttcctggtttaattagtgcagttggtcttatcatcattatgttgccacaacatgcagggccatgggtacaagtaattcaattaaaaagtttaattgcaatgagctttattgtattaagttatactgtcttatctaaaaacagatttagttttatggatgctgcattttgcttaatgtctgtggcgtatgtaggcattggttttatgttcttttatgaaacgagatcagaaggattacattacatattatatgcctttttaattgtttggcttacagatacaggggcttacttatttggtaaaatgatgggtaaacataagctttggccagtaataagcccgaataaaacaatcgaaggattcataggtggcttgttctgtagtttgatagtgcctcttgcaatgttatattttgtagatttcaatatgaatgtatggatattacttggagtgacattgattttaagtttatttggtcaattaggtgatttagtggaatcaggatttaagcgtcatttcggcgttaaagactcaggtcgaatactacctggacacggtggtattttagaccgatttgacagctttatgtttgtgttaccattattaaatattttattaatacaatcttaatgctgagaacaaatcaataaacgtaaagaggagttgctgagataatttaatgaatctcagaactccttttgaaaattatacgcaatattaactttgaaaattagacgttatattttgtgatttgtcagtatcatattataatgacttatgttacgtatacagcaatcatttttaaaataaaagaaatttataaacaatcgaggtgtagcgagtgagctatttagttacaataattgcatttattattgtttttggtgtactagtaactgttcatgaatatggccatatgttttttgcgaaaagagcaggcattatgtgtccagaatttgcgatcggtatggggccaaaaatttttagttttagaaaaaatgaaacactttacactattaggttattacctgttggtggatatgttcgtatggcaggagatggcttagaagagccaccagtcgagcctggtatgaacgttaaaattaaactgaatgaagaaaatgaaataacacatatcatattagatgatcatcataagtttcaacaaattgaagcgatcgaagtaaaaaaatgtgattttaaagatgacttattcatagaaggtatcactgcttatgataacgaaagacatcattttaaaattgctagaaagtctttctttgttgaaaatggtagcttagttcaaattgctccgagagacagacaatttgcacataaaaaaccatggccgaaatttttaacattatttgcgggaccgttatttaactttatattagctttagtcctatttattggtcttgcatattatcaaggtacacctacgtctactgtagaacaagtcgcagataagtatccagctcaacaagcaggcttacaaaaaggcgataaaattgtccaaattggtaaatataaaatatctgaatttgatgatgttgataaggcgttagataaagttaaagataataagacaactgttaaatttgaacgtgatggtaaaacaaagtcagttgaattaacacctaaaaagactgaaagaaaactgactaaagtaagttcagaaacgaagtatgttctcggattccaaccagcgagtgaacgtacgctcttcaaaccaattgtatatggatttgaaagctttttgaaaggtagtacactaatttttacagctgtagtaggtatgttggctagtatatttacgggcggattctcatttgatatgttaaatggtccggttggtatttatcataacgtcgactcagttgttaaagcgggtatcattagcttaattggatacactgcgttattaagtgtaaacttaggtattatgaatttaattcctattcctgcactagacggtggtcgtattttatttgttatatatgaagcgattttcagaaaaccagttaataaaaaagcggaaacaacgattattgctattggtgccattttcatggtcgttattatgatattagtaacgtggaatgatattcgacgatatttcttataatttaggaggataaataattatgaagcaatccaaagtttttataccaacgatgcgtgacgtgccatcagaagcagaagcacaaagtcatcgtttattattgaaatcgggtttgataaaacaaagtacaagtgggatttatagttatttaccgctagcaacacgtgtgttaaataatattactgcaattgtgcgacaagaaatggaacgtatcgattctgttgaaattttaatgccagcgttacaacaagctgaattatgggaagaatcaggacgttggggtgcatatggcccagaattaatgcgtttacaagatagacatggaagacaatttgcattaggtccaacacatgaagaattagttacatcaatagtaagaaatgaattgaaatcatacaaacaattaccgatgacattattccaaattcaatctaaattccgtgatgaaaagagaccacgttttggtttacttcgtggtcgtgaatttattatgaaagatgcgtattcattccatgctgacgaggcatcattagatcaaacatatcaagatatgtatcaagcgtatagccgtatttttgagagagttggcattaacgcaagaccagtagttgcagattcaggtgctattggcggtagccatacacatgaatttatggcattaagtgctatcggtgaggatacaatcgtttacagtaaagaaagtgactatgctgctaatatcgaaaaagcagaagtcgtttacgaaccaaatcataagcatactactgtgcaatctttagaaaaaattgaaacaccaaatgttaagactgcgcaagaattggcagacttcttaggtagaccagtagatgaaatcgttaaaacgatgattttcaaagttgatggcgaatatattatggttttagtgcgtggacatcatgaaattaatgacattaaattaaaatcttatttcggcacagataatattgaattagcaacacaagacgaaattgttaatttagttggtgcaaatcctggttcactaggtcctgtaattgataaagaaatcaaaatttatgcagataattttgtgcaagatttaaataatttagttgtcggtgcaaacgaagatggttatcacttaattaatgtaaatgtaggtagagacttcaacgttgatgaatacggcgatttccgttttattttagaaggcgaaaagttaagtgatggttcaggcgttgcacattttgctgaaggtattgaagttggccaagtattcaaattgggtactaagtattcagaatcaatgaatgctacattcttagataaccaaggaaaagcccaacctttaattatgggttgttacggaattggaatttctagaacgctaagtgcgattgttgaacaaaatcacgatgataatggaattgtttggcctaaatcagttactccatttgatttacatttaatttctattaatcctaagaaagatgatcaacgagaactagcggatgcactatatgctgaatttaatactaaatttgatgtgttgtacgatgatcgtcaggaacgtgctggtgtcaaatttaatgatgccgatttaattggtttaccactgcgaattgttgttggtaaacgtgcatcggaaggtattgtagaagttaaagaacgtttaacaggtgatagcgaagaagtccacattgatgacttaatgactgtcattacaaataaatatgataacttaaaataattaagatcgaatgaattataagagtaggaaaaagctgaaagaaatctgatgcttatgtcctgctcttattatttttgatataatgattattcgatgaaaaatgactgaagacatagtataattaaagataaatttgttttaacaatattatgattagccaaatataaagcatttaattttctatcattactatgctcacataatctaaatattgttcgaacacgtaaaagtaatttctatttaaggtggtaattgtcttggcaatgacagagcaacaaaaatttaaagtgcttgctgatcaaattaaaatttcaaatcaattagatgctgaaattttaaattcaggtgaactgacacgtatagatgtttctaacaaaaacagaacatgggaatttcatattacattaccacaattcttagctcatgaagattatttattatttatacatgcaatagagcaagagtttaaagatatcgccaacgttacatgtcgttttacggtaacaaatggcacgaatcaagatgaacatgcaattaaatactttgggcactgtattgaccaaacagctttatctccaaaagttaaaggtcaattgaaacagaaaaagcttattatgtctggaaaagtattaaaagtaatggtatcaaatgacattgaacgtaatcattttgacaaggcttgcaatggaagtcttatcaaagcgtttagaaattgtggttttgatatcgataaaatcatattcgaaacaaatgataatgatcaagaacaaaacttagcttctttagaagcacatattcaagaagaagacgaacaaagtgcacgattggcaacagagaaacttgaaaaaatgaaagctgaaaaagcgaaacaacaagataacaacgaaagtgctgtcgataagtgtcaaattggtaagccgattcaaattgaaaatattaaaccaattgaatctattattgaggaagagtttaaagttgcaatagagggtgtcatttttgatattaacttaaaagaacttaaaagtggtcgtcatatcgtagaaattaaagtgactgactatacggactctttagttttaaaaatgtttactcgtaaaaacaaagatgatttagaacattttaaagcgctaagtgttggtaaatgggttagggctcaaggtcgtattgaagaagatacatttattagagatttagttatgatgatgtctgatattgaagagattaaaaaagcgacaaaaaaagataaggctgaagaaaagcgtgtagaattccacttgcatactgcaatgagtcaaatggatggtataccaaatattggtgcgtatgttaaacaggcagcagactggggacatccagccattgcggttacagaccataatgttgtgcaagcatttccagatgctcacgcagcagcggaaaaacatggtattaaaatgatatacggtatggaaggtatgttagttgatgatggtgttccgattgcatacaaaccacaagatgtcgtattaaaagatgctacttatgttgtattcgacgtcgagacaactggtttatcaaatcagtatgataaaatcatcgagcttgcagctgtgaaagttcataacggcgaaatcatcgataagtttgaaaggtttagtaatccgcatgaacgattatcggaaacgattatcaatttgacgcatattactgatgatatgttagtagatgcccctgagattgaagaagtacttacagaatttaaagaatgggttggcgatgcgatattcgtagcacataatgcttcgtttgatatgggcttcatcgacacgggatatgaacgtcttggatttggaccatctacgaatggtgttatcgatacattagaattatctcgtacgattaatactgaatatggtaaacatggtttaaatttcttagctaaaaaatacggtgtagaattaacgcaacatcaccgtgccatttatgatacagaggcaacagcttacattttcataaaaatggttcaacaaatgaaagaattaggcgtattaaatcataacgaaatcaacaaaaaactcagtaatgaagatgcatataaacgtgcaagacctagtcatgtcacattaattgtacaaaatcaacaaggtcttaaaaatctatttaaaattgtaagtgcatcattggtgaagtatttctaccgtacgcctcgaattccacgttcattgttagatgaatatcgtgagggattattggtaggtacagcgtgtgatgaaggtgaattatttacggcagttatgcagaaggaccagagccaagttgaaaaaattgccaaatattatgattttattgaaattcaaccaccggcactttatcaagatttaattgatagagagcttattagagatactgaaacattacatgaaatttatcaacgtttaatacatgcaggtgacacagcgggtattcctgttattgcgacaggaaatgcacactatttgtttgaacatgatggtatcgcacgtaaaattttaatagcatcacaacccggcaatccacttaatcgctcaactttaccggaagcacattttagaactacagatgaaatgttaaacgagtttcattttttaggtgaagaaaaagcgcatgaaattgttgtgaaaaatacaaacgaattagcagatcgaattgaacgtgttgttcctattaaagatgaattatacacaccgcgtatggaaggtgctaacgaagaaattagagaactaagttatgcaaatgcgcgtaaactgtatggtgaagacctgcctcaaatcgtaattgatcgattagaaaaagaattaaaaagtattatcggtaatggatttgcggtaatttacttaatttcgcaacgtttagttaaaaaatcattagatgatggatacttagttggttcccgtggttcagtaggttctagttttgtagcgacaatgactgagattactgaagtaaacccgttaccgccacactatatatgtccgaactgtaaaacgagtgaatttttcaatgatggttcagtaggatcaggattcgatttacctgataagacgtgcgaaacttgtggagcgccacttattaaagaaggacaagatattccgtttgaaacatttttaggatttaaaggagataaagttcctgatatcgacttaaactttagtggtgaatatcaaccgaatgcccataactacacaaaagtattatttggtgaggataaagtattccgtgcaggtacaattggtacagttgctgaaaagactgcttttggttatgttaaaggctatttgaatgatcaaggcatccacaaaagaggcgctgaaatagatcgactcgttaaaggatgtacaggtgttaaacgtacaactggacagcatccagggggtattattgtagtacctgattacatggatatttatgattttacgccgatacaatatcctgccgatgatcaaaattcagcatggatgacgacacattttgatttccattctattcatgataatgtattaaaacttgatatacttggacacgatgatccaacaatgattcgtatgcttcaagatttatcagggattgatccaaaaacaatacctgtagatgataaagaagttatgcagatttttagtacacctgaaagtttgggtgttactgaagatgaaattttatgtaaaacaggtacatttggggtaccagaattcggtacaggattcgtgcgtcaaatgttagaagatacaaagccaacaacattttctgaattagttcaaatctcaggattatctcatgggacagatgtgtggttaggtaatgctcaagaattaattaaaacaggtatatgtgatttatcaagtgtaattggttgtcgtgatgatatcatggtttatttaatgtatgctggtttagaaccatcaatggcttttaaaataatggagtcagtacgtaaaggtaaaggtttaactgaagaaatgattgaaacgatgaaagaaaatgaagtgccggattggtatttagattcatgtcttaaaattaagtacatgttccctaaagcccatgcagcagcatacgttttaatggcagtacgtatcgcatatttcaaagtacatcatccactttattactatgcatcttactttacaattcgtgcgtcagattttgatttaatcacgatgattaaagataaaacaagcatacgaaatactgtaaaagacatgtattctcgctatatggatctaggtaaaaaagaaaaagacgtattaactgttttggaaattatgaatgaaatggcgcatcgaggttatcgaatgcaaccgattagtttagaaaagagtcaagcgttcgaatttatcattgaaggcgatacacttattccgccgttcatatcagtgcctgggcttggtgaaaacgttgcgaaacgaattgttgaagctcgtgacgatggaccatttttatcaaaagaagatttaaacaaaaaagctggtttatctcagaaaattattgagtatttagatgagttaggctcattaccgaatttaccagataaagctcaactttcgatattcgatatgtaaaatgaaataatcaaggtatttatttaatgcgtatggcgtagttaaagaaatacaaaattgttgctggacacaaaattatgcctgtatttctttttaacgtcttacgagtctattcgaatgtaaaggtgaagtaaatggacaaacttttacaagaatctctgattaatagtgaagtcatttgtttcaagcataaacttatgctataattaagttgcttaaaaattagtgaactcaggcagaagagtgggagattcccgctcttttctatttgccaaaaagggaggcctgtatgagtaaaattacagaacaagtagaagtgattgttaaaccaattatggaagacttgaattttgaacttgtagacgttgaatatgtcaaagagggtagagatcattttcttagaatctctattgataaagaaggtggcgtagatttaaatgattgtacgctagcttctgaaaaaataagtgaagctatggatgcaaatgatcctattcctgaaatgtattatttagacgtagcgtcacctggtgcagaacgtccaattaaaaaagaacaagatttccaaaatgcaataactaaacctgtatttgtttctttatatgtaccaattgaaggtgaaaaggaatggttaggcattttacaagaagtcaataatgaaacaattgtagttcaagttaaaatcaaagcaagaacgaaagatatagagataccgagagacaaaatagcaaaagcacgtcacgcagttatgatttaacgtgatgaggaggaaaaaacgtgtcaagtaatgaattattattagctactgagtatttagaaaaagaaaagaagattcctagagcagtattaattgatgctattgaagcagctttaattactgcatacaaaaagaattatgatagtgcaagaaatgtccgtgtggaattaaatatggatcaaggtactttcaaagttatcgctcgtaaagatgttgttgaagaagtatttgacgacagagatgaagtggatttaagtacagcgcttgttaaaaaccctgcatatgaaattggtgatatatacgaagaagatgtaacacctaaagattttggtcgtgtaggtgctcaagcagcgaaacaagcagtaatgcaacgtcttcgtgatgctgaacgtgaaattttatttgaagaatttatagacaaagaagaagacatacttactggaattattgaccgtgttgaccatcgttatgtatatgtgaatttaggtcgtatcgaagctgttttatctgaagcagaaagaagtcctaacgaaaaatatattcctaacgaacgtatcaaagtatatgttaacaaagtggaacaaacgacaaaaggtcctcaaatctatgtttctcgtagccatccaggtttattaaaacgtttatttgaacaagaagttccagaaatttacgatggtactgtaattgttaaatcagtagcacgtgaagctggcgatcgctctaaaattagtgtcttctctgaaaacaatgatatagatgctgttggtgcatgtgttggtgccaaaggcgcgcgtgttgaagctgttgttgaagagctaggtggcgaaaaaatcgacatcgttcaatggaatgaagatccaaaagtatttgtgaaaaatgctttaagcccttctcaagttttagaagttattgttgatgaaacaaatcaatctacggtagttgttgttcctgattatcaattgtcattagcgattggtaaaagaggacaaaacgcacgtctagctgctaaattaaccggctggaaaattgatattaaatcagaaacagatgcgcgtgaagcgggtatctatccagtagttgaagctgaaaaagtaactgaagaagatgttgctttagaagatgctgacacaacagaatcaaccgaagaggtaactgatgtttcagttgaaacaaatgtagagaaagaatctgaataataggttggagtgaagtatctatgaaaaagaaaaaaattccgatgcgaaaatgtattctttcaaatgaaatgcatcccaaaaaagatatgattcgtgttgttgttaataaagaaggcgaaatctttgcggatgttactggaaagaaacaaggccgtggcgcatatgtttctaaagatgttgctatggttgaaaaagcacaacaaaaagaaattttagaaaaatattttaaagcatctaaagagcaattggatcctgtttacaaagaaattattagattaatttatagagaagagatcccaaaatgagtatagatcaaatattaaactttttaggattagcaatgagagctggtaaagtaaaaacaggtgaatcagtcattgttaatgaaattaaaaaaggaaatttgaagctcgttattgttgcaaatgatgcgtctgataatacagctaaattaattacagataaatgtaagagttacaaagttccattcagaaagtttggaaatcgaaatgaattgggaatagcacttggaaaaggtgagcgtgttaatgtagggattactgacccaggctttgctaaaaagatgctatcaatgatagatgaatatcataaggagtgattatatgagtaaacaaagaatttacgaatatgcgaaagaattaaatctaaagagtaaagagattatagatgagttaaaaagcatgaatattgaggtttcaaatcatatgcaagctttggaagatgaccaaattaaagcattagataaaaagttcaaaaaagaacaaaagaacgacaataaacaaagcactcaaaataatcaccaaaaatcaaacaatcaaaaccaaaataaagggcaacaaaaagataacaaaaagaatcaacaacaaaataataaaggcaacaaaggcaataaaaagaataatagaaataataagaaaaataacaagaataataaaccacaaaatcaaccagctgctccaaaagaaataccatcaaaagtgacatatcaagaaggtattacagtaggcgaatttgcggataaattaaatgttgaatcatcagaaattatcaaaaaattattcttacttggtattgttgctaatatcaatcaatcattaaatcaagaaacaatcgaattaattgccgatgattatggcgttgaggttgaagaagaagttgtgattaatgaagaagatttatcaatctacttcgaagacgaaaaagatgatccagaagcaattgagagaccagcagttgtaacaattatgggacatgttgaccatggtaaaactactttattagattcaattcgtcatacaaaagttacagcaggtgaagcaggcggaatcactcaacatattggtgcatatcaaattgaaaacgatggcaaaaaaatcactttcttagatacaccgggacatgctgcatttacaacgatgcgtgcgcgtggtgcacaagtaacagatattacaattttagtagtagcagctgacgatggtgttatgccacaaacaattgaagcaattaaccatgctaaagaagcagaagtaccaattattgttgcagtaaataaaattgataaaccaacttcaaatcctgatcgagttatgcaagaattaactgaatatggtttaattcccgaagattggggcggcgaaacaattttcgttccactttctgcattaagtggtgatggtatcgacgatttattagaaatgataggattagttgcagaagttcaagaacttaaagcaaatcctaaaaaccgtgctgttggtacagttatcgaagctgaattagataaatcacgaggtccttctgcatcattattagtacaaaacggtacattaaatgttggtgatgcgattgtagttggtaatacttacggccgtatccgtgcaatggttaatgacttaggtcaaagaatcaaaacggctggcccatcaacgcctgttgaaattacaggtattaatgatgtgccacaagctggggatcgctttgttgtatttagtgatgaaaaacaagctcgtcgtattggtgaatcaagacacgaagctagcattgtacaacaacgtcaagaaagtaaaaatgtttcattagataacctgtttgaacaaatgaaacaaggtgaaatgaaagacttaaacgttattattaaaggtgatgttcaaggttctgttgaagctttagctgcatcattaatgaaaattgatgttgaaggcgtaaatgttcgtatcattcatacagcggttggtgcgattaacgagtcagacgtgacacttgctaatgcctcaaatggtattatcattggtttcaatgttcgtccagacagtggtgcaaaacgtgctgcagaagctgaaaatgttgatatgcgtttacacagagttatttataatgttatcgaagaaattgaatcagcgatgaaaggtttacttgatccagaatttgaagaacaagttatcggacaagctgaagttcgtcaaacattcaaagtttctaaagttggtactattgctggatgttatgttactgaaggtaaaattacgcgaaatgctggtgtacgtattattcgtgatggtattgttcaatatgaaggcgaattagatacacttaaacgtttcaaagatgatgctaaggaagttgcaaaaggttatgaatgtggtattacaattgaaaactacaatgaccttaaagaaggcgatgttatcgaagcatttgaaatggttgaaattaagcgttaattaaataaattacaagctaaaagtatagttaagattgatatgctccctataaatattgcactttttaagtgtctactttatagggagcatatttgatactagcttttggttttttattagaatagattacctattaaaagttacgttatatagacatgatttttgtataaaattttgtggtgacctagaatgctttttaatgacaaaatataatgtcgactattattggaaaattttctgttgaaatgcctatcttacggcaaactttatttgattttataggcttaatttattaaaataacgtgtgagctaaaataattgtttaagcattgttacactaaaaatgcaaataacaattgaacttaaagataaagaggtgacaagaatgagcagtatgagagcagaacgtgttggtgaacaaatgaagaaggaattaatggatatcatcaacaataaagtcaaagatcctcgagttggttttattacaattacagatgttgttttaacaaatgatttatcgcaggctaaagtatttttaactgtattaggtaacgataaagaagtagaaaatacatttaaagcacttgataaagcaaaaggcttcattaagtctgaattaggttctagaatgcgattacgtattatgccggaattaatgtatgaatatgatcaatcaatcgaatatggtaataaaattgaacgaatgattcaagatttacacaaacaagatagataatttagtgttaggtatctggaaaatgtttgataatttcttaatatcggtatattaacattaaacagttaatacatagatgtgtagaaatagttaacattttccagtttttttatgaataaattcagttaatacgctattaaaatatatttttaaaaaagaaggtgacaacatgtataacggtatattaccagtatataaagaacgtggtttaacaagtcatgacgtcgtattcaaattgcgtaaaattttaaagactaaaaaaatagggcacactggtacgcttgatcctgaagttgcaggcgtgttaccggtatgtataggtaatgcaacgagagttagtgattatgttatggatatgggcaaagcttatgaagcaactgtatcgataggaagaagcacaacgactgaagatcaaacgggtgatacattggaaatgaaggatgtacattcagctgatttcaacaatgacgatattgaccgcttgttagaaaattttaaaggtgttattgaacaaattccgccaatgtattcatcagtcaaggtgaatggtaaaaaattatatgaatatgcgcgtaataatgaaacagttgaaagaccaaagcgtaaagttaatattaaagacattgggcgtatatctgaattagattttaaagaaaatgagtgtcactttaaaatacgtgtcatctgtggcaaaggtacatatattagaacgttagcgactgatatcggtgtgaaattaggctttccggcacatatgtcgaaattaacgcgaattgagtctggtggatttgtgttgaaagatagccttacattagaacaaataaaagaacttcatgagcaggattcattgcaaaataaattgtttcctttagaatatggattaaagggtttgccaagcattaaaattaaagattcgcacataaaaaaacgtattttaaatgggcagaaatttaataaaaatgaatttgataacaaaattaaagaccaaattgtatttattgatgatgattcagaaaaagtattagcaatttatatggtacaccctacaaaagaatcagaaattaaacctaaaaaagtctttaattaaaggagatagaatttatgaaagtcatagaagtgacacatcctatacaatctaaacagtatattacagaggatgttgcaatggcattcggatttttcgatggcatgcataaaggtcatgacaaagtctttgatatattaaacgaaatagctgaggcacgcagtttaaaaaaagcggtgatgacatttgatccgcatccgtctgtcgtgttgaatcctaaaagaaaacgaacaacgtatttaacaccactttcagataaaatcgaaaaaattagccaacatgatattgattattgtatagtggttaatttttcatctaggtttgctaatgtgagcgttgaagattttgttgaaaattatataattaaaaataaagtaaaagaagtcattgctggttttgattttacttttggtaaatttggaaaaggtaatatgactgttcttcaagaatatgatgcgtttaatacgacaattgtgagtaaacaagaaattgaaaatgaaaaaatttctacaacttctattcgtcaagatttaatcaatggtgagttgcaaaaagcgaatgatgctttaggctatatttattctattaaaggcactgtagtgcaaggtgaaaaaagggggagaactattggcttcccaacagctaacattcaacctagtgatgattatttgttacctcgtaaaggtgtttatgccgttagtattgaaatcggcactgaaaataaattatatcgaggggtagctaacataggtgtaaagccaacatttcatgatcctaacaaagcggaagttgtcatcgaagtgaatatctttgactttgaggataatatttatggtgaacgagtgaacgtgaattggcatcatttcttacgtcctgagattaaatttgatggtatcgacccattagttaaacaaatgaacgatgataaatcgcgtgctaaatatttattagcagttgattttggtgatgaagtagcttataatatttagagttgcgtatagttatataaacaatctataccacacctttttcttagtaggtcgaatctccaacgcctaactcggattaaggagtattcaaacattttaaggaggaaattgattatggcaatttcacaagaacgtaaaaacgaaatcattaaagaataccgtgtacacgaaactgatactggttcaccagaagtacaaatcgctgtacttactgcagaaatcaacgcagtaaacgaacacttacgtacacacaaaaaagaccaccattcacgtcgtggattattaaaaatggtaggtcgtcgtagacatttattaaactacttacgtagtaaagatattcaacgttaccgtgaattaattaaatcacttggtatccgtcgttaatcttaatatgacgtctttgaggttggggcatatttatgttccaaccttaatttatattaaaaaagctttttacaaatattaacatttattatatgttaagctaatattgagtgaataataaggttacaatgagataaagatgatataagtacacctagagtaataatcaagatattaaaaataaagtatgttttttaaaaaatataacttatatttatactgataagggtgggacgataagtctattttgtaaataatagatggatatcccgctctctttttttccaattcaatattttataactaatattaaaatacgataataaatgatatgatataactattagattcaagagaggagatttataatgtctcaagaaaagaaagtttttaaaactgaatgggcaggaagatctttaacgattgaaacagggcaattagctaaacaagcaaatggcgctgtattggttcgttatggagatacagtcgtgttatcgacggcaactgcatcaaaagaacctcgtgatggagatttcttcccattaacagtgaactatgaagaaaaaatgtacgctgcgggtaaaattcctggtggatttaaaaagagagaaggacgtcctggtgacgatgcaacattaactgcgcgattaattgatagaccaattagacctttattccctaaaggatataaacatgatgttcaaattatgaacatggtattaagtgcagatcctgattgttcaccacaaatggctgcaatgattggttcatctatggcgcttagtgtgtcggatattccattccaagggccaatcgccggtgtaaatgtgggttatattgacggtaaatatatcattaacccaacagtagaagaaaaagaagtttctcgtttagaccttgaagtagctggtcataaagatgcagtaaacatggtagaggcaggcgctagtgagattactgaacaagaaatgttagaggcgattttctttggtcatgaagagattcaacgtttagttgatttccaacaacaaatcgtcgaccacattcaacctgttaaacaagaatttattccagcagagcgtgatgaagcgctagttgaacgtataaaatctttaaccgaagaaaaaggacttaaagaaacagttttaacatttgataaacaacaacgagatgaaaatcttgataacttaaaagaagaaatcgtcaatgaatttatcgatgaagaagatccagagaatgaattacttattaaagaagtttatgcaattttaaatgaattagtgaaagaagaagttcgacgtttaattgcagatgaaaaaattagaccagacggccgtaaacctgatgaaatccgtccattagattctgaagttggtattttacctagaacgcatggttcaggtctatttacacgtggtcagactcaagcactttcagttttaacgttaggtgctttaggcgattatcaattaattgatggtttaggacctgaagaagaaaaaagattcatgcatcattataacttcccaaatttttcagtaggtgaaactggtccagtacgtgcgccaggtcgtcgtgaaattggacatggtgcgttaggtgaaagagcattaaaatatattattcctgatactgctgatttcccatatacaattcgtattgtaagtgaggtacttgaatcaaacggttcatcatctcaagcgtcaatttgtggatcaacattagctttaatggatgcgggcgtaccgattaaagcaccagttgctggtattgctatgggccttgttacacgtgaagatagctatacgattttaactgatatccaaggtatggaagatgcattaggtgatatggactttaaagtcgctggtactaaagaaggtattacagcaatccaaatggatattaaaattgacggtttaacacgtgaaattatcgaagaggctctagaacaagcgagacgtggtcgtttagaaataatgaatcatatgttacaaacaattgatcaaccacgtactgaattaagtgcttacgcgccaaaagttgtaactatgacaattaaaccagataagattagagatgttatcggacctggtggtaaaaaaatcaacgaaattattgatgaaacaggcgttaaattagatattgaacaagatggtactatctttattggtgccgttgatcaagctatgataaatcgtgctcgtgaaatcattgaggaaattacacgtgaagcggaagtaggtcaaacttatcaagccactgttaaacgtattgaaaaatacggtgcgtttgtaggcctattcccgggtaaagatgcgttgcttcacatttcacaaatttcaaaaaatagaattgaaaaagtggaagatgtattaaaaatcggtgacacaattgaagttaagattactgaaattgataaacaaggtcgagtaaatgcatcacacagagcattagaagaataatatttaaagtcatatgacgacaatgtatcgtcatgtgattttttttatgccattttttacgaagtgacccattttgaatttgttgcattgaacattttaaaacgctttattattttgtgtgcaactgttaattatcctgtatgtatagtggttaatagtgtacatcaagtgttttttaacttataatgaatagtgagtttatatatggacgggtaacaaatttaggaggtaagattttgagtttaataaagaaaaagaataaagatattcgcattataccattaggcggtgttggcgaaattgctaaaaatatgtatatcgttgaagtagacgatgaaatgtttatgttagatgctggacttatgtttccagaagacgaaatgctaggtattgatattgttataccagacatttcatacgtacttgaaaataaagataaattgaagggtatattccttacacacggacatgagcacgcgattggtgcagtgagttatgttttagaacaattagatgcaccagtatatggatctaaattgacaatagcgttaattaaagaaaatatgaaagcccgtaatattgataaaaaagttcgctactatacagttaataatgattcaattatgagattcaaaaacgtgaatattagtttctttaatacgacacacagtattcctgatagtttaggtgtttgtattcacacttcatatggtgccattgtgtatacaggtgaatttaagtttgaccaaagtttacatggacattatgcaccagatattaaacgtatggcagagattggtgaagaaggcgtatttgtcttaatcagtgattctactgaggcagagaaacctggatataatactccggaaaatgtgattgaacatcatatgtatgatgcttttgcaaaagtgcgaggtcgcttgatagtttcatgttatgcttcgaactttatacgtattcagcaagttttaaatattgctagcaagctaaatcgtaaagtgtcatttttaggaagatcacttgaaagttcatttaatattgctcgtaaaatggggtatttcgacattcctaaagatttgctaattcctataacagaagttgataattatcctaaaaatgaagtgataattatagctactggtatgcaaggagaacctgtagaagccttaagtcaaatggcgcaacataagcataaaattatgaatatcgaagaaggcgattctgtatttttagcaattacggcttctgctaatatggaagttatcattgcgaatacattaaatgagcttgtacgtgctggcgcacatattattccaaataacaagaagattcatgcttcaagtcatggttgcatggaagaattaaaaatgatgattaatattatgaaacctgaatactttattcctgtacaaggtgaatttaaaatgcagatagcacatgcgaagctagcagctgaagcaggtgttgcaccagaaaagattttccttgtggaaaaaggagatgtcattaattacaacggtaaagatatgatattaaatgaaaaggtaaattcaggaaatattttaatagatggtattggtattggggatgtaggaaatatcgtgttgagagaccgtcatcttttagcagaagatggtatctttattgctgtagtaacgttagatcctaaaaatagacgtatagctgcgggacctgaaattcaatctcgtggatttgtatatgtacgtgaaagtgaagacttattacgtgaagcagaagagaaagtacgtgaaatagtagaagctggtttacaagaaaaacgcatagaatggtctgaaattaagcaaaatatgcgtgatcaaattagtaaactattattcgaaagtacaaaacgtcgtcctatgattattccagtaatttctgaaatttaatcaaaaagtcattaacataaaagaggtcagaacaagtcaccgaaatataatggttgtcatggacaatttacttatattttatgatggtcaattgaaaggggtaacgattaatctgttatcttaagtaaattgatacatagatgatattgttctaacctctttcatcgtctgtttggactacatattctaaacatcaaataggaaattatatataataacgtcgttttaactaaggtaacataaggaggtgcgtcaattggcacaagcaaaaaagaaatcgacagctaagaaaaaaacaacatcaaaaaaaagaacaaattcgaggaaaaagaagaatgataatccgatacgttatgtcatagctattttagtagttgtattaatggtgttgggtgttttccaattaggaataataggtcgtctaattgacagcttctttaattatttatttgggtacagtagatatttaacatatattttagtactcttagcaactggttttattacatactctaaacgtattcctaaaactagacgaacggctggttcgattgtattgcaaattgcattgctatttgtatcacagttagtttttcattttaatagtggtatcaaagctgaaagagaacctgtgctttcttatgtgtatcagtcataccaacacagtcattttccaaattttggtggcggtgtattaggcttttatttattagagttaagcgtacctttaatttcactatttggtgtatgtattattactattttattattatgctcaagtgttattttattaacaaaccatcaacatcgtgatgttgcaaaagttgtactggaaaatataaaagcttggtttggttcatttaatgaaaaaatgtcggaaagaaaccaagaaaaacaattgaagcgtgaagaaaaagcgagacttaaagaagaacaaaaggcacgtcaaaatgaacagccacaaataaaagatgtgagtgattttacggaagtgcctcaagaaagagatattccaatttatgggcatactgaaaatgaaagtaaaagccagagtcaaccaagtcgaaaaaagcgagtgtttgatgcagagaatagttcgaataacatcgtaaatcatcatcaagcagatcagcaagagcaattaacagaacaaactcataacagtgttgaaagtgaaaacactattgaagaagctggtgaagttacgaatgtatcgtatgttgttccaccgttaactttacttaatcaacctgcaaaacaaaaagcaacatctaaagctgaagtacaacgtaaaggacaagtactagagaatacattaaaagattttggggtaaatgcaaaagtgacacaaattaaaattggtcctgcagtaactcaatatgaaattcaaccagctcaaggggttaaagtgagtaaaattgtaaacttgcataatgatattgcattagctttagcagcaaaagatgttagaatcgaagcgccaatacctggtcgctctgcagtaggtattgaagtgccaaatgagaaaatttcattagtttcactaaaagaagttttagatgaaaaattcccgtctaataataaactagaagttggattaggaagagatatatcaggtgatccaattactgttccactaaatgaaatgccacacttattggtggcaggatcgacgggtagtggtaaatctgtttgtataaatggtattattacaagtattttattaaatgctaagccgcatgaagttaaacttatgttaatcgatccgaaaatggttgaactaaatgtttataacggaattccacatttattaattccggttgttacaaatcctcataaagctgctcaagctttagaaaaaattgtagctgagatggaaagacgttatgatttattccaacattcatcaactagaaatattaaaggttataacgaattaatccgtaagcaaaatcaagaattagatgagaagcaaccagaattaccttatatcgttgttattgtagatgagcttgcagatttaatgatggtagctggtaaagaagttgaaaatgcgattcaacgtatcacacaaatggcacgtgcagcaggtatacatttgattgtagcgacacaaagaccttctgtggatgtaattacaggtatcattaaaaataatattccatctagaattgcttttgctgtgagttctcaaacagattcaagaactattattggtactggcggcgcagaaaagttacttggtaaaggtgacatgttatacgttggaaatggtgactcatcacaaacacgtattcaaggggcgtttttaagtgaccaagaggtgcaagatgttgtaaattatgtagtagaacaacaacaggcaaattatgtaaaagaaatggaaccagatgcaccagtggataaatcggaaatgaaaagtgaagatgctttatatgatgaagcgtatttgtttgttgttgaacaacaaaaggcaagtacatcattgttacaacgccaatttagaattggttataatagagcatctaggttgatggatgatttagaacgcaatcaggtaatcggtccacaaaaaggaagcaagcctagacaagttttaatagatcttaataatgacgaggtgtaaaaaatgtcagaaatgaatgcggtatataacgttaaacaatacattttaaatttgattaagcaaaataaattggaatatggtgaccaacttccaagtaatttatcaattgccagagaattaaatgtaaaaaccgacgatgtttatgaagcaattcaggcattgattactgaacaagtcattaaagataattttgaagagggcacaagtgttaagtcactgccccctttcttttatccattgaatgaacttataagtattgggcaaatgattaaaaatgcaggatttgaatgcggaactgaatacttaaattttgatgagcaaccagcaactatgttagatgcaaatttgttgagcgttgaagaaggatatccagtaaccattatagaacgattacgaactgccgatggagaaccggtcgtctattgtttagataaaattgctaaaaaagaattaacatgtacagagtatcaaatgagcaatggatcgatactaagtgcgataaaagaacaaagtaatcataatatttgttacgctgatacagaaattgaagcggtaaattatgaacctcgaatatccgaagtacttaatgcttcgccacacgaaggtttgattttattaaaaattacgcactacaatgaattagatgaacctattttgtattcattaaattatatgaaaaatagcttagttcaatttaaaatcactagaaaaatatagatttaagaagatatagaggaggctatatatttgagtagacaatctcaaccaaatatacatatcaaagtttcaccaacaactaaatttaaaacaactactatagtttttaaatttatggcacctttagaatatgacacaataacagctagatcattattaagcaaattattagttcgagcaactaagaaatggccaactgataagtcgtttaataatcacttagccgatttatatggtgcgtatgtgaatagtacaatttcaaaattcaaagatcagcatgtcattacattttcattagaaattgttaatgaacgttatttaagaaacggtgaatcattatttaatcaaggattagatttattacaagaaatcatttggaatccattaattgaaaataaagcattcaatgataattttgttaaccaagagaaaacattattagccaaaaaaatagaagcaatggtagataacaaagcacaatattcgtttttaaaattactcgaccatatgtttgaaaatgaagcatacaaatacttatctacaggacaactagaacaaatcccacatattactgctgaaacactatatcatacatatcaatcaatgattaataatgatcaatgttctgtttatgttgtcggcaatgtagaacctgaaagtgttgagaaacaaatacgtgaaaaatttgcacttaaaccattcgataaacatcaattccaacattctactcatgatttacatgatgaagaagttgattatattgttgaatatgatgacgtggatcaagctaaattaaatatgggataccgttttccaacacaatatggccaaagtggatatgctgcctttgttgtatttaacatgatgtttggaggagatccttcatctgttttatttaatgaagtgcgagaaaagcaaagtttagcgtactctatacattcacaaattgatggcaaaaatggctatttatttgttttgagtggggtttcaagtgataagtacgaaactgcaaaagacactattataagtgaatttgaaaaaataaaagcaggagatttcactgaagaaaaattagagttagctaaaaaagtaattatttctcatcgatatgaatctgaagatcgtccgaaaagtattatagagattatgcataaccaaatattattagagcaaccacaaagcaaagaaacatttataaatgatatacagaaggtaagtcgcgaagatattgtttctgttgctgaaaaagcatttttagatacaatctatgtgttgacaaaaggaggggataaataatgaaagagcgttattatgaattaatagacgaaagagtattcgaacaagaattagaaaatggtttacgattatttattatccccaaaccaggttttcaaaagacatttgtcacttacactacacaatttggttcattagataatcaattcaaaccccttggacaagaccaatttgttactgtacctgatggagttgctcactttttagaacataaattatttgaaaaagaagaagaagacttatttactgcgtttgctgaagataatgcacaagcaaatgcgtttacaagctttgatcgtacaagctacttgttcagtgcaactgataatattgaaaacaacattaaacgtttacttacaatggttgaaacgccttattttacaaaagaaactgttgataaagaaaaaggtattattgcagaagaaataaaaatgtatcaagaacaacctggatataaattaatgtttaatacattgcgtgcaatgtatcaacaacatccaatacgtgttgatattgccggtagtgtagaaagtatatacgatattacaaaagatgatttgtatctatgttatgaaacgttttatcatccatcaaatatggttttatttgttgttggtgatgtgaatccagaagaaatatgtcgaatagtaaaacaacacgaggatgcgcgtaataaagttaaccaacccaaaatcgaacgaggactcgttgatgaaccggaggatgttaaagaagcatttgttactgaatctatgaaaattcaatcaccaagactaatgcttggttttaaaaataaaccattacaagaagcgcctcaaaaatatgtacaacgtgatttagaaatgtcattattctttgagttaatttttggggaagaaacagatttttatcagaatttattaaacgaaggacttatcgatgatacatttggttatcaatttgtactagagccgacgtatagtttttcaatcgtgacaagcgctactgaagaaccagataaattaaaaaaattattattagatgagttgcgtgataaaaaaggcaatttccaagatgcagaagcatttgaacttttgaaaaagcaatttataggtgaattcatatcaagtttaaactcacctgaatatattgctaatcaatatactaaattgtattttgaaggtgttagtgtgtttgacatgttagacattgttgaaaacatcacgttagatagtattaatgaaacgtcatcgttatatttaaatttagatcagcaagtcgatagtcgtttggagattaaaaagtaatgaaagcattagtattaggtggttctggttcaattggttctgagatagtcaaacaattattaactgatggatttgaagtttatgtgcaatattatcgtactgatataaatgaattaactagcaaatttaatgatgataaagttcattttatacaagcggatttatctcaaacaattgatattgacaaaacatttggtgacattaaatcattagactgtttaatatatgcaagtggtcagtctttatatggtgttttacaagatatgaaagaccatgatattgatgcatgttatcagttgaatgtgttgcaattaattcgattatgtagatatttcgttgatgttttacgtcaaagtgacaatggaagaattattgtaatttcatcaatttggggtgagacaggagctagtatggaaactatttattcgacgatgaaaagtgcacaattaggtttcgttaaggcgcttagtcaagagcttgcactaacatcagtgacagtaaatgctatcgcacctggatttgtagctggtaatatggcaagtgagtggcaagaagatgaacttcaagcaatgataactgaattaccacaacagcgattggttttaccgagtgaggttgctcatacatgcgcctatttatatcacccaaatgctagaagtgttactggaactatacagaaagttaatggtgcttggtatatttaaaatatagaactatttttatgagcaaatgtttttatgattgatgttataatatgaatattacaatgaatcataatttgttaattaaacaaggggtgaggttcaccatgacagttgcagagaaaaaagaatggtacctagaatacgaaattgaaattaatagaccgggtcttttaggtgatgtatctagtttattaggtatgttaggtataagtattgttacaattaatggtgttgatcaaggtaaacgaggccttttaattaaaacagacaaccttgaaaaagttgaacgttttgagcaaatagctcgtggtataaatgaaattgaaataacaaagcttaaaaaaccagaattaagagaccgtcttgcagttagacatggtagatatattgagcaagatgcaaaagataagaaaacctttcgatttgagcgtgaagatttaggcttgttagtagactttttagctgaattgttcaaagaagaaggtcataagttgattggcattagaggtatgccacgggttggtaaaactgaatcaattgttgcgggaagtgtttgtgcacataagagatggttatttattagttctactttaataaaacaaactgtacgtagctctctaattaaaggggaatatgatgccaatcatgtatatattattgatggtgcagttactgccagagaatctaatccaaaacatcaagaacttgttaacgaagttatgacgttaccatcaatcaaagtcgttgaacatcctgatttatttgttgaaacaagtacttgtacaatggaagattttgactatattatcgaattgagagaaaatgaaaatcaagaaatacattacgacgaaatgaagaaacagacagtccaaagtaagaataatttagattttggagatccatttggtggtggttttggtttcttcgagtaagtgtaaggaggctatgaattgaaaacggtcggtgaagcgctaaaaggtagacgtgaaaggttaggaatgactttaacagaattagagcaacgtactggaattaaacgtgaaatgctagtgcatattgaaaataatgaattcgatcaactaccgaataaaaattacagcgaaggatttattagaaaatatgcaagcgtagtaaatattgaacctaaccaattaattcaagctcatcaagatgaaattccatcaaaccaagccgaatgggacgaagtaattacagttttcaataataataaagacttagattataagagtaaatcaaaagagccaatacaattattagtaatcatgggtattacagttttaataactttattgttatggatcatgttagttttaatattttaacagaaataaattagtgagaaatgaggatgtataatgaatattccgaaccagattacggtttttagagtagtgttaataccagtttttatattgtttgcgttagttgattttggatttggcaatgtgtcatttctaggaggatatgaaataagaattgagttattaatcagtggttttatttttatattggcttcccttagcgattttgttgatggttatttagctagaaaatggaatttagttacaaatatggggaaatttttggatccattagcggataaattattagttgcaagtgctttaattgtacttgtacaactaggactaacaaattctgtagtagcaatcattattattgccagagaatttgccgtaactggtttacgtttactacaaattgaacaaggattcgtaagtgcagctggtcaattaggtaaaattaaaacagcagttactatggtagcaattacttggttgttattaggtgatccattggcaacattgattggtttgtcattaggacaaatgttattatacattggcgttatttttactatcttatctggtattgaatacttttataaaggtagagatgtttttaaacaaaaataaatatttgtttatactagatttcgttttcatatggaatctagtttttttaatcccaattttagaaattagccacgcaattgtttataatgatatattgtaaaacaatatttgttcatttttttaggaaaatgtgttgtagcatctgatacattgaatttaaaattgatgtgaatttttaaatggaatacatgaaaaaaatgaattaaacgatacaagggggatataaatgtcaattgccattattgctgtaggctcagaactattgctaggtcaaatcgctaataccaatggacaatttctatctaaagtatttaatgaaattggacaaaatgtattagaacataaagttattggagataataaaaaacgtttagaatcaagtgtacgtcatgcgttagaaaaatatgatactgttattttaacaggtggcttaggtcctacgaaagatgacttaacgaagcatacagtggcccagattgttggtaaagatttagttattgatgagccttctttaaaatatattgaaagctattttgaggaacaaggacaagaaatgacacctaataataaacaacaggctttagtaattgaaggttcaactgtattagcaaatcatcatggcatggctccaggaatgatggtgaattttgaaaacaaacaaattattttattaccaggtccaccgaaagaaatgcaaccaatggtaaaaaatgaattgttgtcacattttataaaccataatcgaattatacactctgaactattaagatttgcgggaataggtgaatctaaagtagaaacagtattaatagatcttatcgataaacagactaatcctacgattgcgcctttggcaggaagtcatgaagtatatattagattgactgcaaatgccgactcaaaagaacaagcacaatcattgattcaacctgttaagcaagaaattcttgatcgtattggagaatattattatggttcagatgacacattaattgagcaagctgtaataaagaaaattcatgaaccttttgtaatatatgatggtattactaatggtgcgttatatcatcgattgaaagaagtggatttaaacgatgttctaaagggtatgattaatcacaatgaaaaatttgttgatattaataaacctattgagcagcaattaaaagatgcagtgcaatttgttaataaattatttaatgtgtcatcagcaattattctattagagtatgatggtgtagtccatataggctatgataataacttagaatttaaaactgagcaatttaaaatgtctaaatctagaaatttattaaagaacagaagtcaaaattatgcgcttataagattattaaattggcttagaacaacaaattaattgtattatcgataaaaatataagcacgtttgttcgttttttgtgttttgattccaagactttatacgaacaaatattcgcaaaacacttgtattttattttgaatccttgtatagtattggtaagataattaaaagatagcaatttcaattaggaggtctcgctttggataacgatcgtcaaaaagctttagatacagtaattaaaaatatggagaaatctttcggtaaaggtgccgtaatgaagttgggtgacaatataggtcgccgagtttcaactacatcaactggttcagttacattagataatgcgctaggtgtaggtggatatcctaaaggacgaattattgaaatttatggtcctgaaagttctggtaagacaacagtagcgcttcacgctattgctgaagtacaaagtaatggcggggtggcagcatttatcgatgctgaacatgctttagatccagaatatgctcaagcattaggcgtagatatcgataatttatatttatcgcaaccggatcatggtgaacaaggtcttgaaatcgccgaagcatttgttagaagtggtgcagttgatattgtagttgtagactcagttgctgctttaacacctaaagctgaaattgaaggagaaatgggagacactcacgttggtttacaagctcgtttaatgtcacaagcgttacgtaaactttcaggtgctatttctaaatcaaatacaactgctattttcatcaaccaaattcgtgaaaaagttggtgttatgttcggtaatccagagactacaccaggtggacgtgcattaaaattctatagttcagtaagactagaagtacgtcgtgcagaacagcttaaacaaggacaagaaattgtaggtaatagaactaaaattaaagtcgttaaaaataaagtggcaccaccatttagagtagctgaagttgatattatgtatggacaaggtatttctaaagagggtgaacttattgatttaggtgttgaaaacgacatcgttgataaatcaggagcatggtattcttacaatggcgaacgaatgggtcaaggtaaggaaaatgttaaaatgtacttgaaagaaaacccacaaattaaagaagaaattgatcgtaaattgagagaaaaattaggtatatctgatggtgatgttgaagaaacagaagatgcaccaaagtcattatttgacgaagaatagtacacaaatttatatctatagttaaacttagcaaatttccttataggattgattgaaagtgatattcatctcataaagctggaataatatctaactttatgggatgcacttcaaatcgagactataaggttttttattttatttattattacattatcaatagttttataatcgagcttcaaaactttagaaaatagtagaaatagcattcaatatagtgcaaaagtgcaaattgataacttgacacttatctcctataaaccgtacaattaatttgtatgatttatatataatttcataaagtcatattgaatttcatataaagagcaaaccctagaaaaggaggtgtttgtgtgaatttattaagcctcctactcattttgctggggatcattctaggagttgttggagggtatgttgttgcccgaaatttgttgcttcaaaagcaatcacaagctagacaaactgccgaagatattgtaaatcaagcacataaagaagctgacaatatcaaaaaagagaaattacttgaggcaaaagaagaaaaccaaatcctaagagaacaaactgaagcagaactacgtgaaagacgtagcgaacttcaaagacaagaaacccgacttcttcaaaaagaagaaaacttagagcgtaaatctgatctattagataaaaaagatgagattttagagcaaaaagaatcaaaaattgaagaaaaacaacaacaagtagatgcaaaagagagtagtgttcaaacgttaataatgaagcatgaacaagaattagaacgcatctccggtctcactcaagaagaagctattaatgagcaacttcaaagagtagaggaagaactgtcacaagatattgcagtacttgttaaagaaaaagaaaaagaagctaaagaaaaagttgataaaacagcaaaagaattattagctacagcagtacaaagattagcagcagatcacacaagtgaatcaacggtatcagtagttaacttacctaatgatgagatgaaaggtcgaatcattggacgagaaggacgaaacatccgcacacttgaaactttaactggcattgatttaattattgatgacacaccagaagcagttatattatctggttttgatccaataagaagagaaattgctagaacagcacttgttaacttagtatctgatggacgtattcatccaggtagaattgaagatatggtcgaaaaagctagaaaagaagtagacgatattattagagaagcaggtgaacaagctacatttgaagtgaacgcacataatatgcatcctgacttagtaaaaattgtagggcgtttaaactatcgtacaagttacggtcaaaatgtacttaaacattcaattgaagttgcgcatcttgctagtatgttagctgctgagctaggcgaagatgagacattagcgaaacgagctggacttttacatgatgttggtaaagcaattgatcatgaagtagaaggtagtcatgttgaaatcggtgtagaattagcgaaaaaatatggtgaaaatgaaacagttattaatgcaatccattctcaccatggtgatgttgaacctacatctattatatctatccttgttgctgctgcagatgcattgtctgcggctcgtccaggtgcaagaaaagaaacattagagaattatattcgtcgattagaacgtttagaaacgttatcagaaagttatgatggtgtagaaaaagcatttgcgattcaggcaggtagagaaatccgagtgattgtatctcctgaagaaattgatgatttaaaatcttatcgattggctagagatattaaaaatcagattgaagatgaattacaatatcctggtcatatcaaggtgacagttgttcgagagactagagcagtagaatatgcgaaataatttttgtctccctcacaaattagtgagggagcttttttaagttgtagtctcaatctagttagacagcactttattggtaataactatattaaacagtagttatttgaaagtaagacggaccttatattaaataagaagttattgcttttaataaaaatgttttaggcttcgtaattactatatttatattatgtaaacctaaaaaggtgattgcttttctatccaataaaaaagaagagaagatgtaacacatcttctcttctgtaatattaattaggatttatttctaagttgagttattttaattgtaaatctgttttctttaattcttttataacttctgcagtatcataacaatttgttgcaattgttgaatatctctctgctaaacgatatgcattaatgtaaagctttaaactttctttagctatatcctctgcatcttcgaattttgatgggttagacataaccactaattctgcaaatttttctggatcaatattaatagacatgtatttatttacaactcctatttattttgatgtcttaatactaacatattgaagttttcagacaaagtaatgtctctttataattgaagaaaaataattcaaagaatttaatatttactttaaatattagaacgtatgaattaaactagtatttatgagaggatgaacaaaacatgagaataatgtttataggggatatcgtaggtaaaattggacgagacgcaattgaaacgtacatacctcaactgaagcaaaaatataaaccaacagttacaattgtaaatgctgaaaatgcagcacatggtaaaggtttgactgaaaaaatatataaacaattactaagaaatggtgtagatttcatgactatgggtaatcacacatatggtcaacgtgaaatttatgattttatagatgaagcaaaacgactagtaagaccagcgaattttccggatgaagcgcctggaattggtatgagatttatacaaattaatgatattaaacttgcagttattaatctgcaaggaagagcgtttatgccagatattgatgatccttttaaaaaggcagatcaattagtcaaggaagcacaagaacaaactccatttatatttgttgattttcatgcagaaacaacttctgaaaagtatgcaatgggatggcatttagatggtagagctagcgctgttgttggaacgcatacacacattcaaactgcagatgaacgtattttaccaaaggggacagggtatataacggatgttggtatgacaggcttttatgacggcattttaggaataaataaaacagaggtaattgagcgttttatcactagtttgccacaaagacatgttgttccaaatgaaggtagaagtgtattatctggtgttgttattgatttggacaaagaaggtaaaacaaagcacatcgaacgtatattgataaatgatgaccatccattttcaacattttaaaattacgtaagtaaacattcgaatcggaccctatcgtccattagtatgaatttaatatagtaccactgtttacatagtaaatcggtggttctttttgttatcatttaatatgaaatatatccataggaggcatataactatgaaaccacaattatcgtggaaagttggcggtcaacaaggcgaaggtattgaatcaactggggaaatcttcgctacggctatgaatagaaaaggatattatttatatggatatagacatttttcaagtcgtatcaaaggtggacatacgaataataaaattagagtttctacgacgcctgttcatgcaattagtgatgatttagatattttgattgcatttgaccaagaaacaattgatgttaaccatcatgaaatgagagaagacagtatcattttagctgatgccaaggctaaacctgtgaaaccagaaggatgtcatgcacagcttattgaattaccttttacagcaaccgctaaagaattaggtacagcattaatgaaaaacatggttgcaataggtgctactagcgcattgatgaatttgaatacaaatacatttgaagaacttattactaatatgttttctaaaaaaggtgacaaggtagttgaagtcaatatccaagcattaaacgaaggttatcaattaatgcaatcccgcttacctgaaatcgacggggactttgaattagagtcaacagatgcactaccacatctatatatgattggtaacgatgccattggattaggtgcaattgctgcaggttcacaatttatggcggcatatcctattacacctgcgtctgaagttatggaatatatgattgccaatatatctaaagtaaacggagcggttattcaaacagaagatgaaattgctgctgtaactatggctattggtgcaaattatggtggagtcagagcgtttacggctagtgctggtccaggtttatctttaatgatggaagcaattggattatctggtatgactgaaacgccattagtcattattaatacccaacgaggtggaccttctactggattacctacgaaacaagaacagtcagatttaatgcaaatgatttatggtacacatggtgatattccaaaaattgttgtagcaccaactgatgcagaagatgcattttatttaactatggaatcctttaatttagcagaacaatatcaatgccctgttatagttttaagtgatttgcaattatctttaggtaaacaaactgttgaaaaattagattataatcgcattgaaattaaacgtggtgaaatcattcaatctgatattgaacgtgaagaagatgataaaggttatttcaagcgttatgcgttaacatccaatggtgtttctcctagacctatccccggtgttaaaggaggtattcatcatataactggtgtggaacacaatgaagaaggtaaacctagtgaatctgcgtcaaatagacaacaacaaatggaaaaacgaatgcgtaaaattgagcagttagtaattgaatcgccagtagaagctaacttacaacatgaggatgcagatattctttatatcggttttatttctacaaaaggtgcaattcaagaaggtagtaaccgtttgaatcaacaaggcataaaagttaacactatacaaattagacaattgcatccattccctacaagcgttattcaagatgcagttaataaagcgaagaaagtcgttgtagtggagcacaattatcaaggacaattggctagtattataaaaatgaatgtcaatattcatgataagattgaaaattatacaaagtatgatgggacacctttcctaccacatgaaatcgaagaaaaaggaaaaataattgctactgaaataaaggagatggtatagatggcgacatttaaagattttagaaataatgttaagcctaactggtgccctggatgtggcgatttctcagtacaagctgcaattcaaaaagcagccgcaaatatagggttagaacctgaagaagtagctatcatcaccggtataggatgttctggccgtctttcaggatatattaattcttatggcgttcattctattcacggacgtgcattacctttagctcaaggtgtaaaaatggcgaataaagatttaactgttattgcatctggaggagatggtgatggttatgctataggtatggggcatacaatccatgctttaagaagaaatatgaacatgacgtatatagtcatggataatcaaatttatggtttgacaaagggacaaacatcgccgtcatcagcagtaggattcgttactaaaacaacgccaaaaggtaatatagaaaaaaatgttgcgcctttagaattagcattatcatctggtgccacatttgtagcccaaggtttttcaagtgatattaaaggattaacaaaactaattgaagatgcaattaatcatgatggattttcattcgttaatgtcttttcaccatgtgtgacttataataaaattaacacatacgattggtttaaagaacatttaacaagtgttgatgacattgaaaattatgattctacagataaacaattagcgactaaaactgttattgaacatgaatctttagtaactggtattgtttatcaagataaagaaacaccatcatatgaatctcaaattaaagagttagatgatacaccactagctaaaagagatatcaaaattactgaagacacgttcaatgcattaactgaacaatttatttaataattaaaactgagtcgtataaatgtgtttataacagatccatttatgctactcagtttttttactattacaaaaaataaaggagtttttaaaaatgaaagacacattaatgagtatacaaataattcctaaaacaccaaacaatgacaatgttataccttacgtagacgaggcgattaaaataattgacgaatctggtttgcattttagagtaggtccgttagaaacgacagtacaaggaaatatgaatgaatgtttaattttaatacaatcattaaatgaacgaatggtggagctggaatgtccaagtattattagccaagttaagttttatcatgtgccagatggcatcactattgaaactttaactgaaaaatatgatgaataacattaaaagtgaagtaaactggatttgaattggcttgttagagatgacgtataactttaactgcttttgcactttatagttaaatttaatataattattaaatgatacgggcaaatagaaaggattttgtaaagtgaacgaagaacaaagaaaagcaagttctgtagatgttttagctgagagagataagaaagcagaaaaagattatagtaaatattttgaacatgtttatcaaccgcctaatttaaaagaagcgaaaaaaagaggtaaacaagaagttcgttataatagagatttccaaattgatgaaaaatatcgcggtatggggaacgagcgtacatttttaattaaaacatatggatgtcaaatgaatgcacatgacactgaggtcattgctggtatacttgaagcattaggctatcaagcaacgactgatattaacactgcagatgttattttaattaatacatgtgcgattagagaaaatgccgagaacaaagtgtttagtgaaattggtaatttgaagcatttgaagaaagaacgacctgatattttaatcggagtttgtggttgtatgtcacaagaagagtcagtagtgaataaaattttaaaatcgtatcaaaatgtagatatgatttttggtacacataatattcatcatttaccagaaattttagaagaagcatacttatctaaagcaatggttgttgaagtatggtctaaagaaggagacgttattgaaaatcttccaaaagtccgtgaaggcaacattaaagcatgggtcaatattatgtatggttgtgataagttttgtacatattgcattgttccatttacaagaggtaaagaacgaagccgtagacctgaagatattatagatgaagtacgtgagcttgctcgtgaaggttacaaagaaataacgcttttaggtcaaaatgtaaattcatatggtaaagatttacaggatatagaatatgacttaggagatcttttacaagcaatttctaaaatagcgattccaagagttcgtttcacaacaagtcatccttgggacttcacagatcacatgattgatgttatttcagagggcggtaatatcgttcctcatatccacttgccagttcaatctggaaataatgcagtattaaaaataatgggtagaaaatatacacgagaaagttatttggatttagtaaaacgaatcaaagatagaattccaaatgtagcattaactacagatattattgtaggctatccaaatgaatcagaggaacaatttgaagaaactttaactttgtatgatgaagttggttttgaacatgcatatacgtatttgtattcacaacgtgatggtacgcctgctgctaaaatgaaagataatgtacctttagatgtcaaaaaggaacgattgcaacgtttgaataaaaaagttggtcattattcacaaatagctatgagtaagtacgaaggacaaactgtaacagtactttgtgaaggtagtagtaaaaaagatgatcaggttcttgctggctacactgataaaaataagttagttaatttcaaagcgcctaaagaaatgattggtaaactagtggaagtacgaatagatgaagctaaacagtattcattaaatggcagttttgtaaaggaagtagagccggaaatggtgattcaataaatgtataataaagatgacgtgttgaaacaagcggataatattgcaaataaaattaaaaatttggatactatcaaaacatatcaacaaattgaagcacagattcatcagaaccaaacgataaagactaaaatggatatgttaaaaaagcatcaaaaacaagcagtaaactttcaaaattacgggaaacaaaatgcgctagaacagtcggaacataccattcaaagtatagaagcagaaataaatacattgcccatagttgaacagtttcaaacttcacaatatgaagcgaatcaattattgaaaatgtttgtatcaacaatggaaacacgtttaaatgaccataataaagccaaacatagtgattaattacaaacaaaaaggagaacaatcatatgaaatcaagaaaactggctataactgcacttttaattgcaataaatgttgtattaagcagtattatcatcattcctctaggaccagttaaggcagcaccagtacagcattttgtaaatgtattaagtgtggtcatagtaggtccttggtatggattagctcaagcgcttatatcatcaattttaagagttctttttggaactggtacagcttttgcatttccgggtagtatgattggagttttattggctagtatgttttacatatatcgtaaacatatattcatggccgcggtcggtgaagtacttggaactggtgtcatcggaagtttaatttgtataccattagcatatttccttgggcttcaagacttcttcattaaaccgttaatgattacgttcatagtctcaagtgctatcggatctattataagttatttcttattaattactctaaaaaaacgtggtattcttcaaaggtttataaaataattttatgatatatgatttcaaacagagtcattgttcattttaatattgaacgcccttacttaattaaatgtcttgaatgttagaattttaatataattctaaacatgctattaacacattttattaggtttgaggcgttttcttatacatttaagatgcttcgttattatatggtatgaataggtttgtaaaagtaagtatgttaaaatgtataagttaaataattaataattagaaagcttacaaacgaatatattgtaaagaaaaattttaaaaagagacaagggttgtgaagaaataatatgtctaatgttacaccaatgatgcagcaatatttaaaaataaaatcagaataccaagattgcttattattttttagactaggtgatttctatgaaatgttttatgaagatgccaaggaggcatcacgtgtacttgaaattactttaactaaaagagatgctaaaaaagaaaatccaattccgatgtgtggtgttccgtatcattctgcagatagttatatagatacacttgttaataatggatataaagtagctatttgtgaacagatggaagatccgaaacaaacgaaaggtatggttagacgtgaggtagtaagaattgtgactccaggaactgtgatggagcaaggtggtgtagatgataaacaaaataactatattttaagttttgttatgaatcaacctgaaattgcgcttagttactgtgatgtttctactggtgaattaaaggttacacattttaatgatgaagcgactttattaaatgaaattacgacgataaaccctaacgaagttgttatcaatgacaatatttccgatcatttaaaaagacaaattaatatggtgacagaaacaataacagtcagggaaacgttatcatctgaaatctatagtgtgaatcaaactgaacataaattaatgtatcaagcgacacaattattgctagattatattcatcatacacaaaaacgtgatttatcgcatatcgaggatgttgttcaatatgcagctatagattatatgaaaatggatttttatgctaagagaaaccttgagttaacggaaagcattcgattaaaatccaaaaaaggaacgctactttggctgatggacgaaacgaaaacaccaatgggagcacgtcgattaaaacaatggatagatagaccactaataagtaaagaacaaattgaagcacgattagatatcgttgatgaatttagtgctcatttcatagaaagagacaccttaagaacatatcttaatcaagtgtatgatattgaacgtcttgttgggcgtgttagttacggaaatgttaatgcgagagatttaattcaacttaaacattccatttctgaaataccgaacattaaagcattactaaattctatgaatcaggatactcttgtacaagttaatcaactagaaccacttgatgatttacttgatatattagaacagagtttagtagaagaaccaccaatttcagttaaagatggtggactattcaaagttggttttaatatgcaattagatgaatatcttgaagcttcaaaaaacggaaaaacatggttagcagaactacaagccaaagaaagacaacgtacaggaataaaatcattgaaaataagctttaataaagtgtttggttattttatagaaataacacgtgccaacttgcaaaattttgaaccaagtgaatttggttatatgaggaagcaaacgttatcgaatgcggaacgatttataactgatgaacttaaagaaaaagaagatatcattttaggtgcggaagacaaagctattgaattagaatatcaattatttgttcagctacgtgaagaagttaaaaaatatactgaacgtttacaacaacaagctaaaattatttcagagttagattgtttacagagctttgcagaaattgctcaaaaatataattatactaggccttcatttagtgaaaataaaacattagaattagtggaatctaggcacccagtagtggaaagagtaatggattataatgactatgtgcctaataattgtcgattagataatgaaacatttatatatttaattacaggtccgaatatgtctggtaaatcgacgtatatgagacaagttgccataattagcataatggcccaaatgggagcttatgtcccttgtaaagaggctgtgttacctatatttgatcaaatattcactagaataggtgcggcagatgatttggtttcaggtaagagtacgtttatggtagaaatgctagaagcacaaaaggcattaacttatgcaacagaggatagtttgattattttcgatgaaattggacgtggtacttcaacgtatgacggtttagctttagcgcaggcaatgatagagtatgtagctgaaacatcacatgctaaaacgttattttcaacacattatcatgaattgacaacattagatcaagcattaccaagtctaaaaaatgttcacgtcgctgctaatgaatataaaggtgaacttatattcttgcataaagtcaaagatggtgcagttgacgatagttatggtattcaagttgcgaaattagctgatttacctgaaaaagttattagcagagcacaagtgattctaagcgagtttgaagcgtctgctggtaaaaaatcatcgatatcaaatttaaaaatggtcgaaaatgaacctgaaattaatcaagaaaattcaagcttaagtgttgaagaaacaactgatacgttatctcaaaaagactttgaacaagcatcatttgatttgtttgaaaatgatcaagaaagcgagattgaactacaaattaaaaatttgaatttatctaatatgacaccaattgaggcattggtgaagttaagtgaattacaaaatcaattaaaatagaggtgttgcaaaatggggaaaattaaagaactccaaacctcattagcaaataaaatcgcagcaggtgaagtagttgaaagaccgagttctgttgtgaaagaactgttggaaaatgctatagatgcaggcgctacagaaataagcattgaagtagaggaatctggcgtccaatctattcgcgtagtcgataatggaagcggaattgaagcggaagacttaggattagtatttcatagacatgcgactagtaaattagatcaagatgaagatttatttcatattaggacattaggattccgtggtgaagcactagccagtatttcatcagttgctaaagtaacattgaagacttgcacggataatgctaatggaaatgaaatatatgtagaaaatggtgaaatattaaatcataagcctgcaaaagcgaaaaaaggaacagatatacttgtagaatcattattttataatacaccagcacgtttaaaatatattaaaagtttatacactgaactaggtaaaataacagatattgtcaacagaatggcaatgagccatccggacattcgaatagcactcatttcagatggcaaaacaatgttaagtacaaatggttcaggacgaactaatgaagtgatggcagagatttatgggatgaaagttgcacgagatttagtacatatatctggagatacaagtgattatcacattgaaggttttgttgcaaaacctgaacattctagaagtaataagcactatatttctatttttattaatggacgatacattaaaaactttatgttaaataaagcgattttagaaggctatcatacactcttaacaataggtaggttcccgatttgttatattaatattgaaatggatccaatcttagtagacgtaaatgttcatccaacaaaactagaagtgcgtttatcaaaagaagagcaactatatcaattgatagtgagcaaaatacaagaagcatttaaagaccgtatattaattcctaaaaataacttggattatgtgccgaaaaaaaataaagtgttacattcattcgaacaacaaaaaatcgaatttgaacaaagacaaaacacagagaataaccaagagaagacgttttcacctgaagaaagtaacagtaagccatttatggcagaaaatcaaaacgatgagatagttataaaagaagattcatataatccattcgtaacgaaaacgtctgaaagtttaatagctgatgatgaatcttccggttataataatacacgtgaaaaagatgaagactacttcaaaaaacaacaagaaattttacaagaaatggatcaaacatttgattcaaatgacgatacatctgtgcaaaattatgagaataaagcgtccgatgattattatgatgtaaacgatattaaaggaacaaaaagtaaagaccctaaacgaagaattccatatatggaaattgttggccaagtacatggaacgtatattattgctcaaaatgaatttggcatgtacatgcttgaccagcatgcagctcaagaaagaataaaatatgaatattttcgagataaaataggtgaagttaccaatgaagtacaagatttattaatcccgttaacatttcatttttcaaaagatgaacaattagtcattgatcaatataaaaatgaacttcaacaagtaggtatcatgttagaacattttggtggtcatgattatattgtaagtagctatccagtttggttccctaaagatgaagtagaagaaattattaaagatatgattgagctaattttggaagagaaaaaagtagatatcaaaaaattacgtgaagatgtagcaatcatgatgtcatgtaaaaaatctattaaagcgaatcattatttacaaaaacatgaaatgtctgatttaattgatcaattaagagaagcggaagatccatttacatgtccacatggtcgtccaattatcattaatttttcaaaatacgaattagaaaaattatttaagcgtgtgatgtagagaggatgaatcaagtgaataacaacatattgcctgccataagaaacattaaagatttagagaaactgattaaaacagattataaaatgtgtgtgcttctagatatgcatataggacatattaaaagtattatggaattgctgaagcaaaatcatatagagtgttttattcatatagatttgataaaaggtttaagtcacgatgaatttgcaagtgaatttattatccagcaatacaagccaaaaggtattgtatcgactaaatctaaagtaataaaaaaagcgaaatcattaaatactttaacgatttttagagtgtttattattgatagtcaagcattgaaacgcagtatagatttgataaaaaaagttgaacctgattttgtagaagtacttccaggtgttgcgagtaaagcgattcatcatattcagaaagaaacaaacacacaagtcattgcaggtggcctaattaatacaatagatgaagttaatgaagctgttaaaaatggagcgaaatatgtaacaactagttatgataaactctggtgaatcataaggctgcaaaaattagatttttcactagatttagtcatataacatattaaaaaagccgttttcatatgggatatgtaataaggaatttaaggtatcatacaaagaataattaaataaaataattagcacctctaaaacgattaaaatcattaaagttatagaggtgtttatttgtaaaaaatgcaactagtcataaaaaatatggctgaagaatgtcatttaagcaactgaacgacatagactatttagtgcggattgatatttctagttttcaaattaaactacttttataaagacttgaaaaattaaatttgacaaaatttttacaaaaaccattgacaacgctttcatatcgatagtattataacaaatataataaaagttaatacatagaatagagacgggagatttctacgagccaaactgctagtgtaggaatctctttgtctttttgggaggacatttaatatgaatgtatatttagcagaattcctaggaactgcaatcttaatcctttttggtggtggcgtttgtgccaatgtcaatttaaagagaagtcctgcgaatggtgctgattggattgtcatcacagctggatggggattagcggttacaatgggtgtgtatgctgtcggtcaattctcaggtgcacatttaaacccagcggtgtctttagcacttgcattagacggaagttttgattggtcattagttcctggttatattgttgctcaaatgttaggtgcaattgtcggagcaacaattgtatggttaatgtacttgccacactggaaagcgacagaagaagctggcgcgaaattaggtgttttctctacagcaccggctattaagaattactttgccaactttttaagtgagattatcggaacaatggcattaactttaggtattttatttatcggtgtaaacaaaattgccgatggtttaaatcctttaattgtcggagcattaattgttgcaatcggattaagtttaggcggtgctactggttatgcaatcaacccagcacgtgatttaggtccgagaattgcacatgcgattttaccaatagctggtaaaggtggttcaaattggtcatatgcaatcgttcctatcttaggaccaatagccggtggtttattaggcgcggtagtatacgctgtattttataaacatacatttaatattggttgtgcaattgcaattgttgtagttattattactttgattttaggttacattttaaataaatcatcaaaaaaaggtgatatcgaatcaatttactaaaataaaaagaaacgtaaatagcataatttaacatgtttgattcatggattatgctattttttcgccaaaatttaacagattttgtacaatgggttagcgattatttttttaataaaggagatactactaatggaaaaatatattttatctatagaccaaggaacaacaagctcaagagcgattttattcaatcaaaaaggggaaattgcaggggtagcacaacgtgagtttaagcaatattttccacaatcaggttgggttgaacatgatgcaaatgaaatttggacatctgtgttagctgtaatgacggaagtaattaatgaaaatgatgttagagctgatcaaattgcaggtatcggtattacaaaccaacgtgaaacaacggttgtttgggacaaacatactggccgcccaatttatcacgcaattgtttggcaatcacgtcaaacacaatcaatttgttcagaattaaaacaacaaggatatgaacaaacatttagagataagacaggattgcttttagatccgtattttgcaggtacaaaagttaaatggattctagacaatgttgaaggtgcacgagaaaaagcagaaaatggcgatctattatttggaacgattgatacttggttagtatggaaattatcaggaaaagctgcgcatattactgattattcaaatgcgagtcgtacattaatgtttaatatccatgatttagaatgggacgatgagttattagaactacttacagtacctaaaaatatgttgccagaagttaaaccttcaagtgaagtatatggtaagacaattgattaccacttctatggtcaagaagtaccaattgctggtgtagctggtgatcaacaagcagcattatttggacaagcttgcttcgaacgtggtgacgtgaaaaacacatatggaactggtggtttcatgttaatgaatacaggtgacaaagcggttaaatctgaaagtggtttattaacaacaattgcttatggtattgatggaaaagtaaattatgcgcttgaaggttcaatctttgtttcgggttcagcaatccaatggttacgtgatggattaagaatgattaattcagcaccacaatcagaaagttatgcgacacgagttgactctactgagggtgtttatgttgttccagcttttgtaggtttaggaacaccgtattgggattctgaagcacgtggtgcgattttcggtttaacacgtggaactgaaaaagagcactttatccgtgcaacattagaatcattatgttaccaaactcgtgacgttatggaagcaatgtcaaaagactctggtatcgatgtccaaagtttacgtgtcgatggtggtgcagttaagaataactttattatgcagttccaagcagacattgttaatacttctgttgaaagacctgaaattcaagaaactacagctttaggtgctgcatatttagcaggtttagcagttggattctgggagagtaaagatgatatcgctaaaaactggaaattagaagaaaaattcgatccgaaaatggatgaaggcgaaagagaaaaattatatagaggttggaaaaaagctgttgaagcaacacaagtttttaaaacagaataaacttgtagattagacttttgtataaacattgtgatacaatcaatttaagttaatatttgaatcgagaaacgagagatttgttcgaacatgtacaattgaaggattgtttatgtgggacaagtctctcgtttttacattttttaggaggcgttttggaatggcattgtctacttttaagagagaacatattaaaaagaatttaagaaatgatgaatatgatttagtaattattggtggcggtattacaggtgcaggtattgcactagacgcgagtgaaagaggaatgaaagttgcattggttgaaatgcaagactttgcacaaggaacaagctcaagatctacaaaattagtccatggtggtttacgttacttaaaacaattccaaattggagtagttgccgaaactggtaaagaacgtgcgattgtttatgaaaatgggcctcatgttacgactccagagtggatgcttttaccaatgcataaaggtggaacatttggtaaattctcaacatcaattggtttaggaatgtatgatcgtttagcaggtgttaagaagtctgaacgtaaaaaaatgttatctaaaaaagaaactttagctaaagaaccattagttaaaaaagaaggtctaaaaggcggcggttactatgttgaatatcgtactgacgatgcgcgtttaactattgaagttatgaagcgtgctgctgaaaaaggcgcagaaattatcaactatactaagtcagaacacttcacttatgataaaaatcaacaagtaaatggtgttaaagttattgataaattaactaatgaaaattatacaattaaggctaaaaaagtggttaatgcagcaggtccttgggttgatgatgttagaagtggtgattatgcacgcaataataaaaaattacgtttaactaaaggtgtacatgttgttattgatcaatcaaaattcccattaggtcaagcagtatactttgatactgaaaaagatggaagaatgatttttgcaatcccgcgtgaaggaaaagcgtatgtaggtactacagatacattctatgacaatatcaaatcttcaccattaactacacaagaagacagagactatttaatcgatgcgattaattacatgttccctagtgttaatgttacagatgaagatattgaatcaacatgggcaggaattagaccattaatttacgaagaaggcaaagacccttctgaaatctctcgtaaggatgaaatttgggaaggtaaatcaggtttattaactattgcaggtggtaaattaacaggctatcgtcacatggctcaagacattgttgatttagtatctaaacgcttgaaaaaagactacggtttaacatttagtccatgtaatacaaaaggtctggcaatttcaggtggcgatgtaggaggtagcaagaactttgatgcgtttgtagagcaaaaagtagatgtagctaaaggattcggcattgatgaagatgttgcaagacgtttagcatctaaatatggttcaaatgttgatgaattgttcaatattgcgcaaacatctcaataccatgatagcaagttaccattagaaatttatgtagaacttgtttatagtattcaacaagaaatggtatacaaacctaacgatttcttagttcgtcgttctggtaaaatgtacttcaatattaaagatgtattagattataaagatagtatcatcgatattatggctgatatgttagactactcaccagctcaaattgaggcttatactgaagaagttgagcaagcaattaaagaagcgcaacatggaaataatcaaccagcagttaaagaataattaatttgtacaatcataaactggtgtcctgttttaggggcatcagtttttttatatgagatacattagtcaattgaaactatgcatcactaaatgtatgataataataaaagcgaatataaaaacgttgttattaaaggtgtgagatgatgactgaaaaacaatttaaattaactgtacaagataacacgaatattgaagttaaagtgaattttacagatgtagattcaaaaggaattattcatatatttcatggtatggctgaacatatggaacgttacgataaattagcacatgcactttcaaaggatggcttcgatgtgatacgtcataatcatcgaggacatggtattaatattgatgaatcaacaagaggccattacgatgatatgaaacgagttatcggtgatgcctttgaagtagcgcaaacagtgagaggcaatgttgataaaccatacattataatcggacattcaatgggatccgttatagctagattgtttgtagaaacatatccgcaatatgttgatggtctaattttaagtggtactggtatgtatccattatggaaaggattaccaaccgttaaggtgttacaactgattacaaaaatttatggtgctgagaaacgggttgaatgggttaaccagttagtatcaaatagttttaataaaaaaatacgtcctttacgtacacaaagtgattggatttctagtaatccaactgaagtagacaactttattaaagatccatatagtggatttaatgtgtcaaatcaattattatatcaaacagcctattatatgctacatacatcacaattaaaaaatataaaagtgttaaatcatgccatgcctatattattagtttcaggatatgacgatcctttaggtgattatggtaaagggattttaaaattggcgaatatatatagaaaagccggcattaaaaatgttaaagttaatctttatcatcataaacgtcatgaagtgttatttgaaaaagatcatgacaaaatttgggaagacttgtttaaatggttgaatcaattttataaaaaataaagaaagtggaattaaatatgaataaaaataagccttttattgtagtaattgtggggccaactgcttcaggtaaaacagagcttagcatcgaactcgcgaagcgtatcaatggtgaaatcataagcggtgactctatgcaagtctacaaatatatgaatattggaactgcaaaagtaacacctgaagaaatggatggtattccacatcatttaattgatatcttgaatcctgatgatacattttcagcatatgaattcaagcgattagcagaagatttaattactgatataacgaatagaggtaaagttccaattatagcaggtggaacaggcttatatattcaatcattaatatataattatgaattagaagatgaaacagttacacctgcacaattatccgtagttaaacaaaagttatctgcattagaacatttagataatcagcaactacacgaatatttagctcaatttgacgaggcttctgccaaaaatattcatccaaacaatcgacagagagtattgcgcgctatcgaatactattttaaaacaaaaaaacttttaagtaatcgtaagaaagtgcaacaatttactgaaaattatgatacattattaatagggattgaaatgtcgcgtaaaacattatattcaagaataaataaacgtgttgatattatgttggatcacggattatttagagaagtgcaacaacttgttgaacaaggctatgaatcttgccaaagtatgcaagctattggatataaagaattaatacctgtgattaacggacaaatgatttatgaagatgctgtcaatgatttaaagcaacattcacgccaatatgcaaaacgacaaatgacatggttcaagaataaaatgagtgttcattggttagataaagaaaatatgtcacttcaaatgatgttagatgagattacaacccagattaagtaaaaggagtccgacagatgattgcaaacgaaaacatccaagacaaagcactagagaattttaaagcaaaccaaactgaagtaactgtattctttctaaacggtttccaaatgaaaggtgttattgaagaatacgacaagtatgtcgtaagcttaaattctcaaggcaaacaacacttgatttacaaacatgcgatcagcacttacacagtagaaactgaaggtcaagaatctactgaaagtgaagaataagttgtaatcatatgggcacgatttaatgactcgtgtacataacgtttgaagtatgataaatagatatagaaataaagtcatatgtgacatcaatcaaatgatgttcaaatgacaagatacaatagaggaatgtttgtaataaaaacgcttcatgtaaaggccgggtcaatatatgatacgactttatatgaagcgttttatttgctatgagctagtatattttataataacttttctatttctctttcgatttgaacaggttttttttgaggtgcaaatcgtttaacaacgttaccttcacgatccactaaaaacttagtgaaattccatttgattttctcattaaagaatccgtgttgtgccgcagtcaaatatctaaataaaggtaattgatgttccccttttacgtctattttttgatgcatagggaaggtaacaccatagtttaatttacagttttgagctgcttcttcgcctgatccaggttcttggccaccaaattgattacaagggaaacctagaattacaaacccttgatctttgtatttctcgtataatgattgcaaaccttcaaattgtgaagtaaagccacattcgctagctgtattgacaattagcataacgtcacccttatatgcatctaatttgtaagtaacacctttatttgtttctactacaaaatcataaattgtctccattgaatcatcctttcgatttacttaaaatgtaccataaaatcgtgtaatagtctttactaaaactctatgatagaatactttgagtaggattttattaaggagatgtataacatggctcagcaacaaattcatgatactaaaaataaactagaaaaagctgtcttagtcggtgtacatgctcaagatgataagcaatttaattttgagtctacaatggaggaattatcatctttatcagagacttgccaacttgaagtgttgggtcaaattactcaaaacagagatcgtgtagatcgcaaatattatgttggtaaaggtaaaattgaagaaattcaagcatttattgagttcaaagatattgatgtagtcatcacaaatgatgaattaacgactgcacaatccaaatcactaaatgaagctttaggtgtaaaaattattgatagaacccagttgattcttgaaatatttgcattaagagcaagaagtaaagaaggtaaattgcaagtagagctagcacaacttgattatttattacctagattgcaaggccatggtaaaagcctttctcgtttaggtggcggtattggaactagaggccctggtgaaacgaagttagagatggatcgcagacatattcgaactcgtatgaatgaaattaaacatcaattgcggacggtagaagaacatcgcgaaagatatcgaaataaaagaaatcaaaatcaggtgtttcaagtagctttagttggttatgcaaacgctggtaaatcatcatggtttaatgttttagcaaatgaagagacgtatgaaaaagatcaattatttgcaacgttagatcctaaaacacgacaaattcaaataaatgatggatttaatttaattatttcagatactgttggttttatacagaaactacctacgacgttaattgcagcttttaaatcaactttagaagaggctaaaggtgcagatttattagtacatgtcgtagatagtagccatcctgaataccgtacgcagtatgacacagttaatgatttaatcaaacaattagatatgagtcatatttctcaaatagttatttttaataaaaaggacttatgtgatcatgcatcaaatcgtccagcaagtgatttgcctaatgtttttgtttcttctaaaaatgatggtgataaattacttgttaagacgttatttatcgatgaaataaaaaggcaattaacttattatgatgaggcaattgcgacgaataatgcagatcgattatatttcctaaaacaacatacattagtgactgaacttaaatatgatgaaattgaaaatgtttatcgtataaaagggtttaaaaaataataaaaggacgaaattcaaatgaaagatataagtaagatagtagctgacgtcgaatcaacgttagcaccatattttaaagaaattgaagaaactgcatatattaaccaagaaaaagtattaaatgcatttcatcatgtcaaagcaaccgaaagtgatctgcaagggtcaacaggttacgggtatgatgattttggacgtgatcatttagaagaaatatatgcgcaggcatttaaagcagaagatgcaattgttcgcccacaaattatttcaggtacgcatgcgattactattgcattacaaagtttattaaaacatggtgatgaattaatttatataacgggaagtccatatgacactttacttgaagtcattggtgtaaacggaaatggtattgaaagtttaatggagcacggcgtatcgtataaagatattgcacttaaagaaggtaagatcgatattgaaggtgtgttagatggggtttctgagcgcaccaaagtaatagcgattcaacgctcgaaaggctatgatcaaagaccttcaattcctctagatgaaattgaacaggtaattactaggttgaaagaagagcatcctaatattttaatatttgtggataactgttatggggaatttgttgaaagacgtgaacctatagaatgtggtgccgatttaatagcaggatcattaattaaaaaccctggcggtggtttagctaagattggtggatacattgctggtagaaaagatttaattgaacgatgtggttatagattgacagcacctggtattggtaaagaagcgggtgcatcattaaatgcattgcttgaaatgtatcaaggtttctttttagcaccacacgttgtcagtcagagtcttaaaggtgcattgtttactagtttatttttagaaaaaatgaatatgaacacaacgccgaagtactacgaaaaacgaactgatttaattcaaacagttaaatttgaaacgaaagaacaaatgattttattttgtcaaagtattcaacacgcatccccaattaatgcacattttagtccagaacctagttatatgcctggttatgaagatgatgttattatggcagctggtacgtttattcaaggttcatcgattgaattatctgcagatggacctattcgtcctccttatgaagcatatgttcaaggaggattaacatatgaacacgttaaaattgctgtgacaagagctgttaagcagttgaaagaacaaggacttatataatagattaaatttcacccttaatgataatgtgttttgggtgaaattttttgcgaagatttatcagattatttttaaaaattgaaaaaatattttagatgtaggtcgttttatggcgttttagaggtcgaaattgcagttatatcaatgttttgagctttatgttagaaaacctgacatatttttgaaatcctaaaaaaattatgataagttattaacaagttcaaaagtagaggagaggaacaatgatatcgaatgatgcaatcagacgaaatatggctgtcttctctatgagtgtagtaagtaagttaacggatttaacgccaaggcaaatacgttactatgaaacacatgaactcatcaaacctgaaagaacagaaggtcaaaaacgtctgttctcactcaatgatttggaaagattactagaaattaaatcattattagaaaaaggatttaatatcaaagggattaaacaaatcatttatgactcacaagagcatttaacaacagatgaacaagagataagaaaaaagatgattgtagatgccacgcaaaagcctattggagaaactttgccaataaatcgtggtgatttatcccgatttattaaataaaatttggaggattttaaaatgccaaaacgtactttcactaaagacgacattcgtaaatttgcagaagaggaaaatgtaagatatttaagattacaattcactgatattttaggaacaattaaaaatgttgaagtgcctgtaagccaattagaaaaagtacttgataacgaaatgatgtttgacggttcttctatcgaaggtttcgtacgtatcgaagaatcagatatgtacttacatccagatttagatacttgggtaatcttcccatggactgctggacaaggtaaagttgcacgtttaatttgtgatgtatataaaacagatggtacaccatttgaaggggatcctcgtgcaaacttaaaacgtgtattaaaagaaatggaagatttaggcttcacagactttaacctagggcctgaaccagaattcttcttgttcaagttggatgaaaaaggggaaccaactttagaacttaatgatgatggtggatatttcgacttagcacctacagatttaggtgaaaactgtcgtcgtgatattgttttagaattagaggatatgggcttcgatattgaagctagtcaccatgaagttgcccctggtcaacatgaaattgactttaaatatgcagatgctgttacagcatgtgataacatccaaacatttaaattggttgttaaaacaatcgcacgtaaacataatttacacgcaacatttatgcctaaaccattatttggtgtgaatggtagcggtatgcactttaacgtttcattattcaaaggtaaagaaaatgcattcttcgatccaaatactgaaatgggcttaacggaaactgcatatcaatttacagcaggtgtgcttaaaaatgcacgcggatttactgctgtatgtaacccgttagtaaactcatataaacgtttagtacctggttatgaagcaccatgttatattgcatggagtggtaaaaaccgttcaccattaatccgtgtaccatcttcaagaggattatctactcgtatcgaagtacgttcagtagatccagctgcaaacccatacatggcgttagctgcaatcttagaagctggactagatggtattaaaaataaattaaaagttccagaaccagttaaccaaaatatttacgaaatgaaccgtgaagaacgtgaagcagtaggcattcaagacttaccttcaacactttatactgcattaaaagcaatgcgtgaaaatgaagttattaaaaaagctttaggaaatcatatctataatcaatttattaattcaaaatcaattgaatgggattactacagaactcaagtatctgaatgggaaagagatcagtacatgaagcaatattaatacgctaaacaatgatgggaaatcagtaatatcaagggctagagcgttttgctttagctcttttttgatttaactgggcaacttttcgaggtgtaaaatgtgtcttttgttacgattgggcaacttttggtcaagtaaatgttttgtgtatttatttttttaaagctagggaagaccattttatattttagttcacatgaattttaatatatttggaggtgatgagatgaggcgataaaagaacgtcgcgaaaacgttgagtattacttgaaaatagccacattgatattacttctcatcgaattcatttgcagaacgttctaaggtaagaccccgaaaagaggggccttactactcattattaagggggtaatactatatgaaaagagaaacaaaacaaaaaatatctttttgtttatcgattggtattttcattttagttatactactattgatattctaaaaaattaaaaatttcgcctcatctaaattatgaattgctatgatgaaatatacaatacaatcaaaaaattgatagaaaacaaagagataacgagttatcaaattaataaagatactgggataagttacggtaatattaatgctatgcgccgtggagaaagaagaatagaaaatttaagcttaaagaatgcaaagatcttatatgaatatgcgaaaaaggtattataatataagaattgagttcaataggcatacaataactgcccaatctagtgactgagtgggtgtttttatagtattaaaagttttctaaaagtgaaagaaatcatgtttagtgatttacttatgtttttcgaaatagtataataattttatataatatatagaacttcagtataccttttgagtatatatggagttctttcttttttacaagatgtatatgtataaatggaaatgtttattacattacataaaaacctttaggtgctcttagatggatgttaatcataaagcaaagagattttgaaaatataggttattataatttagaattacaaattattaatcttgtcattggatatgggaattcaaacatatcacttaccccaatttgtggaatgttaaataactataaagaggaaaggagaaaaaatgataagaatggttaaagaaaaagaacgaatagcaaaattaaatttcgaatagctgtgacaagcataataattcaagtacttaattttataaaatcgttcttttaaaaaggtaaagggcaaaagacctttaccacattaaatagggaggtggtatttatgacaagagaattaaggaaaaaattaactctctatcttaacattgcaactttaatattatttattattaatttaactagaaaaaaataaactattctttcattttgataaagattatgaaccagtttaaagaaatttataatacaatagaaaaattactaaatgataaatcaatatctaattatagaattaatcaagacattggtgtgtcttatggtggtataagtgaattaagaagcgggaaaagaaaagtgaataatttaactttagaaacagcggaaagactctataattatcaaaaacaattagaaataatgattgaagattaaaatatggtcatatctttttaaatatcatggaatgagccttttaaatcatctaattttaaagtatattaaagatggataacttaatgtgaatataaataaaaaattatcaaataatataatatagaatagatggagacaagaaattttatcaatatataataaaaaacgccaatactattaggtattagtttatgaattaactagtttggcaactagaaagaaactatgtattgctaaacgtagttactgcattaggattattataattataaattgaaagagagcgtgattaaaaatgaatgagattgaaactattataagtgaaatagaaaagttattaactaacaatacaccatatagtatttcaaaaaactcaggtgtaccacgtcaaacagttactgatttaaaggtaggtaatactaaaataaaggatgccaaatttaaaacaataatcaagttatatgagtatcaaaagtcgttagaaaataattcagagtgctaataaatataccttgtttgattagatggacaagagattaaatttctaataatttcatgattgtgtgtccacgctttgtccacctcaataaaattatctctaggtttttaaaattgtacatgtttaaacaatcaaaagtatgcatttttatattatcatttccataaaaatttaaatgatctttaagtgatgatataaaaggctgaacatagtaaataagttaactttaatgcagtatactatacatattttgtaataatgtttatgcacataatttttcattgacaattttttatattaaattgtgtaattggcatatatgatgatttgtgataattatattgtaatatagcatttggttttatgattctaaaattaatagatttgaaaagtatactttatttcatgaaagtttttggtacatttacttgaaaatgtttttattacaaagttacatggctaaatgtttcttaaaaaaattaattcatcgagtgtaaagaatcgtgtggtaaacataatttatatagattataaggaggtgaaaatggtcgaggaagtaaaaacgataaaatagtttgaatgttttgatttcaattctgaaagtactattgaatttgtaaactaataagaatgtgaggtttgatttaatacgaagtcatattctttgaataaaatattactttctcaccattagtaaaatgaagatgactattaaagtgcgaaaaacaaataaaaaagagaaaatagaatttttaatagggatgtttataattattttagtaatattagggttcaaaattatgaaataaatgtatagtatttgagaagtctatatgacttcgaaaaaattaaagtctaaagatatctcaatatctcaaatttaatagactactggagttagtagtttgaatattgaaagacactaatctaataaaaatacataaaaggttaaactttagaagtggctgtaaacttcaatgaatactaaacattgaagtttagtaaaaggcgtaaggtatacaagacaaatcgtttatctttgacaaagtaattgatgatgaaaagtcattaatatgtagaaacaaaaattgaaaatatgaaatttaactattatgaagtgatgatagccattaatgaatagaaaaataataaaatcatttataaataaaaaaaatacgttgagttcacagaatttcgaaaaaaagtagtaaacattgtacagatatggagatgaaaaaaatgtcagaatacaagaaaaagataattgaattaattgaaagtaatttaacaggatatgaaatttctaaaaaaactggagtttctcaatatgtactttcacaattaagacagggcaaacgcgaagtagataatctaaccctgaatacaacagaaaaattatatgaatatgccaataaagttttgtaatttaactactgtataaattaatcaagctatgtttatttaatttaactattaataaaaaccatatggtgaatggatattataataattaaaatacaaaaatagtagattccaatttgtgaaaaaggagtatgtcgtttcatttagaatttattgcacgaaattagcatcgaataagggaaaataagtgtttagttttaaatgataaaaaagattggaatggatcgtcttgaaatgctcccttcaaagttttcattttttcaatgtctacttcgaagggggcatttccattaaattgttatagctttttatatttgtataatgaacatataagtttaagaaggtgcgagtgaagggaataaaaaagctcaaatgtaccaaattgttaatcttaataaatctctactttataaagattgaatggacattcgagcgttaatgagtcaggagggacttcccctcctacaatttaataataatactttcttcaccactgtacaaggagtgatttgttatgttcaaagtgaattattcgattttaagttattatccagatatctatctccatagtaatttagctgtaggtgtggcatttgaaattataggagaaagttatcataagaatgaaattaaatttataacccaaagaagaaaaattttatcatttgatgatgaattagacaatatagaacttattaatatgtttttggatgggcttaaatgtgaattcgaacaaactaatcaatcattaaaaagttataagaaaaagtttgttaataatttctactttgagaatattgaatataaaatgtttgactcattaaaagaagttaataattttattgaaaaaacatataaatatgtattacatcttggtttagataaaaaagaaagacttaagaaaactgagaaagaacttttgactagctaagtaaaaaggtcaaacatattgttctgaatttaaataagtaataaccgtacctttattgatgcggttattttttatgtaaaaaaacgaaaaaagttttaaaaaaagtgttggatacaaaacaggttggaaagagaagaaaaaaggacaaatatcgcaaaagccaaaagcgaaatcttccgcaactacactttaggctttgcaacacttgccacaataataaaatgttttttatagagggggatatcccctcccacgtattatattacgaggtgatgaaaatgacaaacttaactaaaactagaataataatctttattaattatctaatcggaattttagctttaatatttgccttttatataatcttaatgtcaatagcggtttaaaaatgctgttttatggaggtttgaaaatgtcgttttttaggggtttaagattgtcgtatatttaatgatttttcggttttataatcttttaatcgatatgattctccagtaactttaaatacttttgaatggtgaactaaccgatcaattatagctgctgatacaatcttattactaaatgactctccccaactcgaaaatggaatattagtcgtaattattgttgatttccattcataccttagtgacattaactggtagaataaatcagcaattcaccagtagaattattgaatatcacttttacttcttcaccaatgtatttagtaggtaccgagtatttaccttttctaaagttgatcatcgattctttagaaacgattcttatacactcatcttcgatgtaagtaactagtaacttggcattaaaagaatttaaatgttcttcttcttcataattgaaaacgtcgataggtcgttgttctgttgcttgtgaaatttctaagtgattcaattcgtgacataaatcgtttactagcccaataagttctacagcatcattaaattcataatcgtatggtcttaaatgctgttcaacaaatttagcatccttactaaattgataaaataaattattaaagacgactttttttattgtgttctcggtcgatcaactacagttctcatattatcgaaccagatttcttatggaaccccttcggtgtattcaaaagcgtcttttgaacattcaaataaggtatcttgttttctatcccaagtgaatgtgatatacttcatttttgaatagtgtagaacgtaaagaagatgttgaattgataagttctgccaaacttatcatgcatcaccatatcttctttccagtctacttgagcagctataccgagattagtttctacacgtatagttgctttttttgcctcattttgttttttatttttacagtattcttgtaaaatattatatttaccttcataaccctttttctccatatatttaaaaatggccatagctgtatatcctaattcaatttttttattattaatttctttaaatgaatctagctttgatgctttcttattttgttgtcttttcttcaatcgttctaattcattttattttcctgcttcataatattttttaactgttcttgaatcacaattatattgtcgaccaagctcagcataatttggtttaatacctttcataatgtaaaatagcactccttcataaatgtcatgtctcaattaaataacctccaatcgaagattgagttaagacatgattatataatttaaaaaagaaaaaaatgtattataaatcagtacgtcaaaggaataaggatatagaagtagatataatttctaaaaatactaatttgaattaaaacctagttaaaagagcttatgaacatttgtttgagaataaatatagattagataactgtattaataatttctatccagattataatattgcagtaagttggcaatgtttaagagaaggaaaaacaataaaaaacaagatttaatactacttcgtcaggaggcacttgaacattatttgatgaataaatataattattactatagagaagcacatgggattgtagaaagaaaatacaatttttctaattatattgagaaatagggtgatttgattgattattatgaggaagttaaaagaagataatcaagttatagtatatgaatatattccacaagataaaatagaaaaagggaaaggcgaaataacagtaaataaattagattcaaaggtaattgactataaattatcaaaagttgaaaatgaaaaaggtattttagtttatagagataaatcatttcatgcaatattaaattttattgatgaaaataaatttacaaatgaatatatatatgcatggtattaaagcatcctttctacacagataaagagaaagtggtgctatttttatacatttttttaaccttccaatgtgaaggttatttttattgtccaaaacgtgctgatgacattttaaaagcaagtatggaatatcagtcgacagactataaacggaggtatatctcatggaaagaaatgaaagtaatattactgacgtaactcagaacgaagagcaactagacaacagtgatgaacaatcacaacagaatgagaaaacattttctcaagaagaagtatcacaattgattaaagagcgtatagctagagaacgcaaaaaatcagatgaacgtattaaagatgccaaagaaagcaatgatagcaatgaagtagcttatttattaaaagatggtaaagttacaaaagtatatggtgatcaagatagtgtatcttttatgctagggtgaaaagcaaccgaattattatttatttaacagtaaaccgaattcaattgttatgttacataaccatcctggacagtcaggattttcattgaatgatttagagatgtttattgaaaataaatctatccgaacattgactattgttactaactatactgtagtaaaatatataagtaaaactccattatataatcagtctcaagtttataaaattatgaaagatataaaacaatctataattatgagaaataatgaagcgatagttgataatattctaaagtaactttataataaaagaaatataaaacgaaagtacaaataggagtaatacattatgtcaattcaacatttagatggttacatttctatagaagatttttttaagcatatggaagaattatcgaagaaagaagaattagaaaaagagattaatcaatcaaagtctaaatatcaatagcatcctttctacacagataaagagaaggtggtgctatttttatacacttttttaactatttactgaaatagcagaattacaaaagttaacatatttaaaagaacttggtgaagatggcaaatataaatatgttgccaaaatagatagtaaaacatctaaattatgtcattcactcaacggaaaaatatataaagttaaaggtatgataccaggtgtaaatgcgtcacctatgcatccttggcgtagaagtaccacagtgccacatctcggcaattggcgagacaagttctttaaagagcgtgaaggtaaatatcgggtagagaacaaaaaaatgaaaaagaaaaattacaagaaaaagctaaaaaagaaatgcttgatatgataagtaatggtaaaataaagatgcaattgaataatgaaaaacaacagcgtcatattttaaacacaaatgaatataataacaagaaaaataattcatctttcttacccagttatattacaatagattctaatgaaattgaaaagatgactaaaaaagaatttattgattttccagttttgtttgatgatgaagggaattttagaaaaaaacaagttatagattacaaaaagataataggtaaatcttatgtgaatggtaaatatattgaaatgaaattaggtaaagttcattattctaaaactggttttcatgtagttccgtatattaaaaaggagtgattaaaaatgaatttacagtcatacataggcaaattagtcaaattaacgcttactaataataaaatattaattggaaaagtgatagactttgatgataaagttgataattttgatggttataattcgatagaaattgatacaggtagaattacatatgatatatcagaaaataaaattaaaactattgttttacaataatagcatcctttctacacagataaagagaaagcggtgctattttttgcgcttttataacaactaaggatacaagacacttaccttcaacaatatcctcatctaaacctatcgatttcctaagctcaattttaaacacaaagtttatttgtaaagatgcacacctataaaaatcttaatcatcgaaaagtcacaaacatctccatattaaaaacttaaatagtgcattccatttaaactaaacatcgatattcctaccaatatagacttagtaattcgattgttaatacattactttcataaaataactacaaccgtcataatacttctcaaatgtcgtcaaattaaagtaaatacagcacaaattaacatttttaaatatataaaataaaacaagatactcaataatctgtagtaccttgttttggaataatgtaattttatatcatcaatggcttcaaatgagcagtttcaaatataaataaacacaactactcaactgatcttgattaattaataaataaatgatttggccgatgacatataacagcattattagattaattctaatagtttatttaaattttcttcggttgtcgcccagctggttgcgaatctaacgacacgatgttgatcatcgtatttttcccaaacagcaaatttaactttttgttctaactctgctattttctcgttacttaaaataaaaaattgttgattggttggagaatcaaagtaaagacgatagcctttatttataaacccgtctttcatcttatttgccatttcgatagcatgtctgcttatattaaaatataaattatccgtaaataattctaaaaattgtatgcctgttaaccgtccttttgctaaaagtgcaccgtgatgtttgattcgagtggtaaattgtttcggttcattattcttcgtaaaaacaattgcttctccgcataatgcacctatctttgtaccacctatataaaatacatcacaatatttagcgatgtctttaatagtcatatctgattggtcactcatcaatccataccctaatcgtgcaccatccataaataatggaagctgatattgcttacatactttgcataactcttccaattctgatttagagtataaagtgccatattctgtaggatgagaaatatataccattcctgggaataccatatggtcctttttaaaatcacttttaaatgtctccatgtaagtttcaacatttgaagcactaacttttccttccttagagggtatagtaattactttatgtccactatattcaattgcaccgccctcatgcacagcaacatgaccagtgtctgctgaaatgaccccttcgtaactttctaacattgaattaataacaacctgattggtttgcgttccacctactaaaaaacgaatagtagcatttggacaatcaattgtatctttaatcttttcaattgcctgagctgtgaattgatcaaagccatatcccgaagcttgtacgagatttgtatctactaatcgttttaatactttttcatgagcgccttctaaataatcattttcaaatgagatcactacatttcccccctaaaactaatatcaacattttaaaaagataaaccaatttcaaaactagttcgatatttaaaatgtattatgaatggttaaagtttgtatcgcattatcgcgaagttgaataaatatattatacatcaaacaatacattatgaaaattaattaattttttatcacaattactttgcgtgccgaaacacatatattaatgattgaattttactgttaaaagttctatgatttaggaaatagagaaaagaggggatttaaatgcaacaaattaaacttaaaacttttacagctgagactttagaattattagaatcaaatatcaacgaatttttaggttctgaagaagctgcaaatttgaaattagtaaatattacaattaaagaaattgaggaaagaacatttccaaataatgaagaagagtttaatgcaatattaactctatctgtaaataaataatctggaacgaaaggtacaaaagttttttgtgcctttctttataggagaaataaactatgcaattttcattttcaaatgatttaggaacactttttaccattattttagcaattgcctttatcattaatttggttctagcgtttattattatttttttagaaagaaatagacgtacagccagttcaacatgggcgtggttatttgtactttttgtattaccattaattggttttatcctttatctattttttggaagaacggtttctgcgcgtaaactaaataaaaataatgggaacgtgttaacagattttgatgcgcttttaaagcagcaaattgaaagctttgataaaggtaattatggtacagataataaacaagttcaaaagcaccatgatttggtacgtatgttgttaatggatcaagatggctttttaactgaaaacaataaaattgatcattttattgatggaaatgatttatatgatcaagttttacaagatattaaaaatgctaaagaatacatccatttagagtattatacattcgctctagatggcttaggccaaagaattttaaaagcgttagaagagaaattgaaacaaggtctagaagtgaaaattttatatgatgacgttggttcaaagaaagttaagatggctaattttgatcattttaaatcgttaggtggagaagttgaagcattttttgcttctaaattaccgttattgaatttcagaatgaataatagaaatcatagaaaaatcatcgttatcgatggtcaactaggttatgtcggaggatttaacattggtgatgaatatctaggtttaggaaaattagggtattggagagatacgcatttacgtatacaaggggatgcggttgatgcactgcagttgcgatttattttagactggaattcgcaagcacatcgacctcaatttgaatatgatgaaaaatattttcctaaaaagaataaatcattcggtaatgcgccaatccagattgctgcaagtggtcccgccagtgactggcatcaaattgaatatggttatacaaaaatgattatgagcgctaagaagtcggtatatttgcaatcgccttatttcattccggataactcatatataaatgccattaaaattgcagctaaatcaggggtagatgttcatctaatgattccatgtaagccagatcatcctttagtttattgggcgacattttcaaatgcctctgacttattatcaagtggtgttaaaatttatacgtatgaaaatggatttatacattctaaaatgtgtttaattgatgatgaaatcgtatcagtgggcacagcaaatatggactttagaagttttgaattaaattttgaagtaaatgcctttgtatatgatgaaaatcttgctaaagatttaagagcggcttatgaacatgatattacaaaatcaaaacaacttactgaagaatcttatgctaatagaccattgtctgttaagtttaaagaatcgttagcaaaattagtttcgccaattttataaagaataatttcaagtctcattttaatgaggctttttttatttctgcaattaataactataacaatattatgtaaaccaatgaggtgacaaatgtcattttgaaccaatgacaaagtatcctattttaaatcgaataaatttactaatcttaaattaataaaatattaagaggtggttcatttgattcaaatatctaatattaataaatcatttaagaaaaagcgtgttttaaaaaacatttcatttgatattgaaaaaggtacatgtgtcgcattaatcggaaaaaatggtgctggaaaatcaacattagttgatattttaagcaataaaataattgctgatgatggcgtgatttttgataaagacaacttattgcaaagtgaaaatcgcagtataatgtttcaaaaaacgatatttccagatcaattgaaggtaattgaaattatcaaattatatcaatcattttatgaaaatccattaacattggacgtaataatagaactaacaaagtttaattctaatcaattgaatcaatttgcaaatcaattatctggaggtcaacaacgattacttgattttgtaatatctttaataggacaaccacagcttattttgttagatgaaccaacgtcaaatatggatattgaaatgagagaatatttttggtcaataatagctaagttaaaagaagaaaatcggacgattctttatacatcgcactatatagaagaagtagagcgcatgtccgacaaaattattttgatagaaaatggagaaatcaaacttaatgattcaacgtcacatattagaaccaatcagcaatctcagattacgttatctgatgaatataaaagaaagttaaaaccagataaagatgatttagttattcaaaaaaatcataatggcactatcaaaattattacttcaaatgtaaatgatacgattttatatcttcaacaacttcatattaatttggatgatattgaaatacaaaaagtctcaattgttgattcatacttcaacaataaaaagcaaaggggatctaattatgatactaagttacttgaaaatcgaatttaaagttatactgcgtaaaaaaacaacattaatattatctattttatttcctgttattttctatatattatttacttcgatattggatttgccggaagatgttaaacctaaattttataaagagtatatgtatagtatgacggtttatagtttgttaagttttagcttactaacttttccattagatattattaatgaaaaacaaaatggatggcgccaaagattaatggtaacaccatttacttttactagttattatatttcaaaagtagtgaaaactatgctgcaatttgcaatagcgatattagtgatttttatggttgggcatttttataaaggtgttgaaatgagtgcagttcaatggttagagtcaggaatatttttatggttaggtgcgtctctattaataacttttggcatattattttctttgttaaatgatattcaaaaaacaagtgctttagccaatatcgtaacaattggattagcagtattaggtggattgtggtttccgataaacacatttccgaattggcttcaacatgttgctcatgttttaccgagctatcatttgcgtaaactaggtgtagatattgcttcaaatcatcatatcagtttaatatcaattgttataatactcttgtatgctttagggagtattatagcagtatattgtattagtcattttaaaagggcggaataaaatatgaaatttttaaaagatacttcaattgctgaaatatcgtctatactttatctgatttttcctattgccggtatattttttaatgaagtatatggtcccaaatggttgtatattatatcagtcattgtcttttcgttatcgtatcttatattagttatagtaaataatagacttaatacattaatgttttacattttgtttattattcattattttattatttgttattttgttttcagtgtacatccaatgctaagtttgtttttcttttatagtgcttttgccattccatttacttttaaaaataatgttaaaaaaatggcaactaatcttttcattttaacgatgattatatgtttaacaattacttacttagtacataacgactattttgttgcaatgacgatttattatgttgttattttgttaatcgtgtttgataatttaaaaaaagtgaaagatcgtgaatataaaaaagaaatagaagaaaaaaatcgatatattaatacgttaataactgaacaagagcgtcatagaataggtcaagatttacatgatacgcttggtcatgtgtttgcaagtttatcattaaaatcagaattagcttataaaattattgattctgatactgaaaatgcaaaagctgaattgttagcgattaataagttgtcgcgggaatcattaaacaaagttcgcgaaattatcgatgatataagattaccatcatttattgaagaaattgagagtatctgtaaaattttaaaagatgctgacattcagtttacgtttgaaaataaagaattggcacaattattgagtcctacaaaacaatccattttagtaatgattgctcgtgaagcgataaacaatgtgattaagcatgcaaatgcttcaaaagtttatggtcaattacgagctatgaatgaacataaattacagttcattatacaggataatggagaaggtattgacagcggctgtgaaataaagagtatttcacaacgagtacaacatttaaatggaacattagaagttgaatcgaataaaggtactaaattaattatcgaaatgcctacagggggaatagcatgatttctataattattgcagaagatcaaaatatgttacgacaggcaatggttcaattaattaaactacatggtgattttgaaattttagccgatgtagataatggtctcgatgcaataaaaattattgaggcacaccatcctgatgtagttattttagatattgaaatgtcaggcatgactggacttgaagttttagcagaaattagaaagaagcatttgaatattaaagtgattattgtaacaacttttaaaaggccggggtattttgaaaaagctgttgcaaatgatgtggatgcatatgttttaaaagaacgttctatagaagaattagtggaaacaatttataaagtgtataacggtaagaaagaatatagtgcttctcttatgacttcatttttcacagataaaaacccattaacaccaaaagaacaaattgtattaagggaaatcggcaatggtttaagtagtaaagaaataagtgaaaaattatttttgacagatggaacagttagaaattatacatctgttataattgataaattatttgcagataatcgttttgatgcttggaaaaaggcgaatgaaaaaggctggatctaaatacaaacaaaaaagtattgagtgttttgatttaagagactttgaaagtgagtcaataatcaaaatcttactcaatacttttattttggtactctcaagttagatttgttaactaattttttcgcttattataaaacgaaacaatcaggtaaacgataaaacctacaaagatacccaataaaatagataatactgccgtcactattaatggtaatttgaaaaatatttgtaggaaaataccaatgataattgcgataattactgcaattaatgtgactgtattttcatttgaaatgttcattcattttcactccttaacaataacattatatcatgctatagctttccaaaatattgaaatatgtagatatggctattgacgatatttcttaacttttatatgattaatcggaatgaaaaaagagaagtaggtggcaaaatgaagtcaaataaatcgcttgctatgattgtggtagccatcattattgtaggtgtattagcatttcaatttatgaatcatacgggtccttttaaaaagggaacaaatcatgaaactgtacaagatttaaatggtaaagataaagtacatgttcaaagagttgtggatggtgatacatttattgcaaatcaaaatggtaaagaaattaaagttaggcttataggggttgatacgccagaaacggtaaaaccgaatacgcctgtacaaccatttggcaaagaagcatcaaattatagtaagaagacattaacaaatcaagatgtttatttagaatatgataaggaaaagcaagaccgctatggtagaacattggcgtatgtatggataagtaaagatcgtatgtacaataaggaattagtggaaaagggacttgctagagagaagtatttttcaccaaatggcaaatatagaaatgtatttatagaagcacaaaataaagctaaacaacagaaattaaatatttggagtaaataattaaataggtgattatatatattaaagtaaaatatacttgaagcatcgatttattattaccataaatttatatatagaaataatttaaaggcataataaccatagtgcgtatcgagcgtaatggattattatgcctttgattttacttgaatatagctgtgatttgatcaacctgatctttatttaaagggtgtttagatagctctatggcttcgctaataatacgtcgtaacgaagattttgttgaaactgtatcaacatatttatctctttcttcagaaccttgaatgatattaactgtaccatcactaaagtaaataacaccggtactttggactttaaagttaaagttttgttcaatatgatcctttaatgctttagcattatttgctgctaattgatacggatcataatcataaaaatcataaataacacgatttggttgaactgtttctgtaaaagtatagatagactttcttgatgaattaaactgatcatgatattgctggctaatgtaatgaccgacaactttttcaatattactattgctcacttctgtatcatgctcatcaggtacatcaaagtgataaaatgttttttcaccccagctttttacatcaacgtttattaaaccgatatctgaaacaatgataaaatcaaatgaacgtgcatactcgaaaaacggatgtttagtagctaaattgcttgtaacgataatatcgtaatattttaatttaccattttcgagatagctatctaaaatcttgcgtaattctcttttagcatttttgtatgcatggtggccaacatcattattagaactcagcatttgacttcttaattcagcattttctgcacttaatgctttgttctttttaataagttgctttcttgcataaacttcggtatctattttactattactatacctttgatttaaaactaatataccaattaatgctacaatgataatgataagtacaacataaaaagacattttttcaccaatcctttttgacttctttaactttgtatacaataataattaataaagattaattgttattcaatttcccacatttttattagtcgattttagttcatcattgttataatcaaattataaactgacagatattgatgttcaatgaatatgacgtgaaagattcgtgaattcaagtttatgtcgaatttatgttataacggtcatttaaatgacagaattaggtcactcatagtattttgaagattgaattcattaattttaaaatgtataatgatatttgtgaaagcgcttgcttaggaggtgtatttgagagtgaatgaaatgaatgctaaagaacaattagtggacaatttaatgaaaacatcatcgcaattatttaaatttcacggtgaagttgccatgcagcttttcttaaatgatgaattaaaattaccttctattgttgaaatatgcgtggaacgtaagcgtttaagtgatattgtgaaagttattccgcaatcatatgcgttactatacatagataagcaagatcaagcaatagctaaagaagatttatcactttcaaaaattgcaaaagtttatgtgcaatatgatgatacaacaataatgagtattttcgtttatgatgttgtaaacgatgaatggatttttagattggatccgaatatacgtatacctaagagtaacatttacttccatagtttaaattgggatgtagattatattaaaccggaaatagttctaatgtatgatctaatgcaacaccatcagtatcatcattattccaattataaacgagtcatagatgcattaagctactatcaattttttattttaaaatttgtagtaggtgagcaacgtattaaggatgcaatacagagaacaataaataattaagaaaaagcaattcataacgcagttgaatacatgtgttacgaattgcttttatattagtttttatcacacaagttttttaatgcaaccccgtgatagcaaaactcatatgtagataatacagctttttcagcatcatctacatgaattccaaacatcatcgatatttccgaagcaccttggttaatcatttttaagttaatttttgattcagctaaggcatgtgtaattttatttgcagtaccaatgactttattcataccttcgccgacaatcattaaaattgctaaatcatgctcaatacttagctcatcaacatcacatttttgacgaatttcatttaatacttttgtttctttattttgaatttgttttgaacgcataacgatactgatagtatcaatacctgaaggcatatgatcaaatgaaatattattatcctctaagacacctaatatctttctagtaaagccgacttgtctattcattaaatactttttgatattaataacagtaaaatctttatcacaacttataccgctaatcacatttttcgcatttatttctctatcatgcactataaatgtacccttatcttgagggcggttcgtatttttaatcaccacagggatgcgatctttataaagtggttgtaaggcttcatcatggaaaacactaaaaccagcataagataattcacgcatttctcgataagtgatttcttcgattaattcaggatctttgatgatatttggattagctttataaataccagacacatcggtgaaattttcataaattgtggctctaacaccacttgatatgatggcgccagttatatctgatccgccacgtggaaatgtaactatatatccttcatgagatacgccaaaaaatcctgggataattagtttttcgtcataatctcttaattttttaatttcagagtaagcactatctaatatttgtgcttcttgtgggacgtcagtaacaaaaatacccgcttccttcggtgatatatattttgttggtataccttgactattattatatagagctatcaattgcgcattaaaatcttcaccacaagaaagtaatgcatctaatagtctcttcggttcattttttaattgattaatataatgttccaaagtcacatctatcgtccgtaaaatactttcatccatttgcaattcttttacaatatcatcataacgctgaataatttctctttttttatcatgataatcaagatgattaatgaccttttcatataatctgattaataaatcagttgttttaatatcattatcatgtcttttacctggagcagaaacgataacaatctttcgctctggatcagaattaacaatatttaaaacctttttaatttgagtagcattggagacggagctaccaccgaatttggaaactttcatagtgcatgccaacctttctaaaaaatcagaaaattgtattcagttttgtaagtaagaatgatattatgtatttatattttgaatattacgaactttacaaaaataaagaataattctatactatactatcatctagtgtttttcaataatacatttgtttttctcaaaagcacaaacggaggtacataaaatgaaaaaattaaatatagcattattaggattaggtactgtcggatctggtgttgttaaaatcatcgaagagaaccgacagcaaattcaagatacattaaataaagatatcgtcataaagcatattcttgttcgagataaatctaaaaagagaccgctaaatattagccaatatcatttaactgaagatgttaatgaaattttaaatgatgattcattagatattatcgttgaagtcatgggaggaattgaaccaactgtagattggttaagaacagcacttaaaaataaaaaacatgttattaccgcaaataaagatttattagcagtacatcttaaacttttagaagatttagcagaagaaaatggtgtagctttaaagtttgaagcgagtgtagcaggtggtattccgatcgtaaatgccataaataatggtttgaatgcgaataatatttcaaaatttatgggaattttaaatggtacctctaattttattttatctaaaatgactaaagagcaaacgacatttgaggaagcacttgatgaagcgaaaagacttggttttgctgaagcggatccaactgatgatgtagaaggggtagatgcagcgcgtaaagttgtcattacatcatatttatcatttaaccaagtcattaaattaaacgacgttaaacgaagaggaattagtggtgtaactttaactgatattaatgtagccgatcaactggggtataaaattaaattgattggtaagggaatatatgaaaatggtaaagttaatgcatcagtagaaccaacgttaattgataaaaagcatcaattagcagctgtagaggatgaatataacgcgatttatgtcattggtgatgccgttggtgacacgatgttttatggaaaaggagcaggcagtttagcaacaggtagtgccgttgtcagtgatttattgaatgtagcattattctttgaatcagatttacacacattgccaccacattttgaattaaagacagataaaacaagggaaatgatggattctgatgcagaaattaatattaaagaaaaatccaatttctttgtagtagtgaatcatgtcaaaggttcaattgaaaattttgaaaatgagttaaaggcaatattaccattccaccgatcattaagagttgcaaattacgataatcaatcatatgccgctgttatagttggattggaatcatcaccagaagaattaatcactaagcatggatacgaagttgacaaagtatacccagtagaaggagtttaattataatgagaagatggcaaggattagtagaagagtttaaagcacatttaccagtaaatgaaaatacaccaaaattaacattgaacgagggaaatacaccactcattcattgtgaaaatatgtctaaaatactaggtatagatttatatgtgaagtatgaaggtgccaatccgacaggttcatttaaagatcgcggtatggtaatggctgtgacaaaagcaaaagagcaaggtaagaaaattgtaatatgcgcttcgactggaaatacatcagcgtctgcagcagcatatgcagctagagcaggtttaaaagctatcgtcgtaataccagaaggtaaaattgcgttaggtaaactgtcgcaagcagtaatgtatggtgcagaaatcgtttctattgaaggaaactttgatgaagctttagaaattgtaaaagaaattgcaaaaagtggcgaaatcgagcttgtaaactctgtcaatccatttagaatcgaagggcaaaagacaggctcatttgaaattgtgcaacaattagacggtgaagcacctgatattttagcgattcctgtaggtaatgcaggtaatattactgcatattggaaaggctttaaagaatatcatgaagctaaaggatcacaattgccgaaaatgtttggcttccaagctgaaggcgcatcaccaattgttcaaaataaagtcattaaaaatcctgaaacgattgcaactgctattcgaattggtaatcctgctagttgggaaaaggcgactaatgctcttaaagaatcaaatggattaatagatagtgttactgatgatgaaattctagaagcatatcagttaatgacaactaaagaaggtgtctttagtgaaccagcaagtaatgcttctattgcaggtttaattaaattgcatagacaaggtaaattacctcaaggtaaaaaagtagttgcgattttaactggtaatggactaaaagatcctgatactgctatttcactactagataatccgataaagccattgccaaatgataaagatagcattatcgattatattaaaggagctttataacatgtcgaatgttttggagttaacaattcctgcatcaacagccaaccttggagttggctttgattctataggtatggctttagataaatttttgcatctgtctgtaaaagaaacatcagggacaaaatgggaatatattttccatgatgatgcatcgaagcaattacctactgacgaaacaaactttatttatcatgtggcacaacaagttgctgctaaatatagtgttgacttgcctaatttatgtatcgaaatgagaagtgatattccattggcaagagggttaggttcgtcagcttctgctttagtaggagctatatatatcgcaaattattttggtgatatccaactatctaaacacgaggtattacaattagcgactgaaatagaaggacatcctgataatgttgcgccgaccatttatggtggtttaatcgctgggtattataatgatgtctcgaaagaaacgtcagttgcacatattgacataccagacgtggatgtgattgtaacgataccaacctatgaactaaaaacagaagcatcaagacgtgctttaccacaaaagttaacacatagtgaagcggttaaaagtagtgcaattagtaatacaatgatttgtgcattagcacagcacaattatgaattagcaggtaaactcatgcaacaagatggctttcatgaaccgtatcgtcagcatttaattgctgaatttgatgaagtgaaaacaattgctagtcaacataatgcctatgcaactgtaattagtggtgctggaccaacaattttaatatttagtcgcaaagaaaatagtggcgaattggttcgcgctttaaatagaaatgtagttacatgtcattctgaattagtagatattaatgttagtggtgttaaagaacgaattgtataccaatagacactttatattgtaaaatagtattgaatgtgaaatagagaggagatttaatgcgatatgacaaattataaagttgtcgttttagatatggatgacacattgctaaattcagataatgtgatatcagaagaaactgcaaattatttaacagcaattcaagatgaaggttattatgttgttttagcatctggtagacctactgaaggtatgattccaactgctagagatttaaaattacctgaacatcatagctatattattagttataacggcagtaaaacgattaacatgactaatgaagaagtagaagtaagtaaatcgattggtaagcaggatttcgatgaaattgtagattattgtcgagatagaggatttttcgttcttacatatcatgatggtcaaattatttacgacagcgaacatgaatatatgaatattgaagcagaattaactggtttaccgatgaaacgtgttgatgacattaaggcgtatattcaagatgatgttcctaaggtcatgggtgtagattatgtagcgaatattacagaagctagaattgatttgaatggtgtgttcaatgataatgtagatgctacgacaagtaagccattcttcttagaatttatggctaaagatgtttcaaaaggtaatgcaattaaagcgttatgtcacaaattgggatattcggtggatcaagtcattgcttttggtgatagtatgaatgataaatcaatgtttgaagtcgcaggtctagctattgctatggggaatgcatcagatgaacttaagcaatatgcagatgaaattacgttggaccataatgaaaatggtattccacatgcgctcaaaaaattgttataaattttaaaataagcctaatcacaggatatttgaataagatatcttgtgttaaggctttttatttatgtgaaaatgcgttagctataatatggcgtatttgaaatacatattatagattagtaatgatatctaaagaatagagtagatgcatattttttaagtaaatcaagtattagctggtcacggaggtagataaataaatttgaagcattctgaatattaacgaatgtattaaaaaatgcagtgacaatctaacattaattgttaaaatcactgcaagcatcttgattttatttagctgtttgtgtccagtcatgcttccctctgaagcgttttacatgagcatatatttggtcagcagtataatctaaatttgtataaactgtaatactgaacgctgattggttttcagcaaatgattcttcggaaaataattcctttaagtgcgtaaataaatcattcatttgtttatggtttaaaccgggatattcccttaaagttctctttaataattgtccgttcttttcttctaatgcttgaactacaataacaaatctctcatcttgctttagtacatcatcaaataaatttgtttgtccaatcattgaatttcacccctgaaaagttattgttatctatattatacacgatatgcaaaatatcgaaaataaagaatggtaacatggtcataataaaatataaacagaatactagttaatacactttatactagaaaaagatattaaagtatatctgctttacaccattaaaaagcggcaaatgctatagataatctaaagcatctgccgtgtgagaatttatttatttttgattgtcataatcgtgtggttttaaattaattgtttctagctttacaaattttgttttgtgaatgattttatgaataaagtaaatcaacgctagaatgattaaaggtaaaaagtttttaaaagcatttaaccattgatcttttaaaatatattcaactgaaccaccaaatagcaagaataatagagtagtgatgacaatgattggtcctaatggataaaaaggtgctttatatggtaggaccttattaggatcttgaccttgttttttaatagcttgtcgcaatcgtatttgtgaccaaatgcttgatccccaaacaactataatcattgaaccaataatttcaagtaaattaaaaacggcatttgaattaaagtttgcataaataataacaataacaacgactgcataagtagttaatagtgctcttaaaggtaactttgttgtcttgtttaatttacttaaaaatttaggtgcttttttgtctgaacttaaggaatacaacattcttcctgttgtataaacacctgaatttgcagcggataataatgaagttaaaataaccgcgttgattactgatgctgcaaaggctatgcctactctatcaaatacaatggtaaatgggctttgacttattgaactacttgctcttaataatgatggatctgtgtacggaataattgcaccaattactgcaattgataagacatagaataaaagaatacgccaaaatacttgtttaattgccttaggcatagactttttagggtcatctgattcaccagcagttactgctactacttctgtaccaccaactgaaaatccggcgactaataatacgcctaagaaaccagagataccaccaacaaacggtgcttggccttttgtatagttttcaaatccatatgcatgaccacctaagataccgaaaatcattaaaaagccaaaaataacgaatacgataattgttaacactttaatcaatgataaccaaaactcagtttctccaaatgattttacagaaaaaatgtttaataatagtaaaattgtaataaagattaagctccaagtaatggggtggaaaaatttaaatgtgtcccagaaataaagcacatttgacgctactatgacatcaacacttgtaactaatgaccacaatgcccaatacaaccatcccatggtaaagcctagagatgagtcaataaagcgtgttgaataagagctgaatgaacctgatactggataaaatgttgccaactctccaattgatgacattaagaaatatagcacgacaccaataacaagataagcgagtatagcgcctccaggaccagcttgagaaatgatattaccagtagctacaaatagaccagtcccaattgcaccacctatagcaatcatggaaatgtgtcttgagttaagactacggttcattttattatcttccatatttagtctcccatctatttaaatatacccattattgtaagctttttaagtgtactattcaataactatttagcactgtaaagcgaaaaaattaaaattttctgattttttaatcatcttgagcatgtttaattgtaattctgatggggttaaattataatatgtattaaattataattattataaattgtggagggatgactatgtcacaacaagacaaaaagttaactggtgtttttggacatccagtatcagatcgagaaaatagtatgacagcagggcctaggggacctcttttaatgcaagatatttactttttagagcaaatgtctcaatttgatagagaagtaataccagaacgtcgaatgcatgccaaaggttctggtgcatttgggacatttactgtaactaaagatataacaaaatatacgaatgctaaaatattctctgaaataggtaagcaaaccgaaatgtttgcccgtttttctactgtagcaggagaacgtggtgctgctgatgcggagcgtgacattcgaggatttgcgttaaagttctacactgaagaaggaaactgggatttagtagggaataacacaccagtattcttctttagagatccaaagttatttgttagtttaaatcgtgcggtgaaacgagatcctagaacaaatatgagagatgcacaaaataactgggatttctggacggggcttccagaagcattgcaccaagtaacgatcttaatgtcagatagagggattcctaaagatttacgtcatatgcatgggttcggttcacacacatactctatgtataatgattctggtgaacgtgtttgggttaaattccattttagaactcaacaaggtattgaaaacttaactgatgaagaagctgctgaaattatagctacagatcgcgattcatctcaacgcgatttattcgaagccattgaaaaaggtgattatccaaaatggacaatgtatattcaagtaatgactgaggaacaagctaaaaaccataaagataatccatttgatttaacaaaagtatggtatcacgatgagtatcctctaattgaagttggagagtttgaattaaatagaaatccagataattactttatggatgttgaacaagctgcgtttgcaccaactaatattattccaggattagatttttctccagacaaaatgctgcaagggcgtttattctcatatggcgatgcgcaaagatatcgattaggagttaatcattggcagattcctgtaaaccaacctaaaggtgttggtattgaaaatatttgtccttttagtagagatggtcaaatgcgcgtagttgacaataaccaaggtggaggaacacattattatccaaataaccatggtaaatttgattctcaacctgaatataaaaagccacaattcccaactgatggatacggctatgaatataatcaacgtcaagatgatgataattattttgaacaaccaggtaaattgtttagattacaatcagaggacgctaaagaaagaatttttacaaatacagcaaatgcaatggaaggcgtaacggatgatgttaaacgacgtcatattcgtcattgttacaaagctgacccagaatatggtaaaggtgttgcaaaagcattaggtattgatataaattctattgatcttgaaactgaaaatgatgaaacatacgaaaactttgaaaaataaatttgatatgtagtttctatattgcgtagttgagcagtttatgatatcataataaatcgtaaagattcctaacaagagagggtgtttaacgtgcgcgtaaacgtaacattagcatgcacagaatgtggcgatcgtaactatatcactactaaaaataaacgtaataatcctgagcgtattgaaatgaaaaaatattgcccaagattaaacaaatatacgttacatcgtgaaactaagtaattcttatcattcaaatacgacgatttgaaaataaagcgggcttacctattatattggggagctcgcttttttatgaaatttttgtgaagagtgattaatgaattgagtttcatcgatagaacaatttatgattgtattagttgttactttattaaaatttgagaatatttatagaaggaaatagattactgattttataaagtcattttgttagcgaatgcttgaaagagtatttaatatagtagaatttaaaatttcaaagtggaatttaataagtacgaaataattgtggatatgttttataaatgttcgacaatacattttaatgttaaatatgatggtttagaaaataatttaacaaagaaatgaaactttactgttgaattatgtgaggattgtgttattatataaatcgtaataattacgatttgataaaaagtgaggtaactatatatggctaagaaatctaaaatagcaaaagagagaaaaagagaagagttagtaaataaatattacgaattacgtaaagagttaaaagcaaaaggtgattacgaagcgttaagaaaattaccaagagattcatcacctacacgtttaactagaagatgtaaagtaactggaagacctagaggtgtattacgtaaatttgaaatgtctcgtattgcgtttagagaacatgcgcacaaaggacaaattccaggtgttaaaaaatcaagttggtaaaatcaaatttcgtactttagcccatttacaatatcaataaaacaatgtacagtatatacgaatgctataaactgaatgttttctcatattaataaggatacattcggtttttaatttgcatttaaaaataattagtttttaaaggggctatttaaagtgaaaatatttgattacgaagatattcaattaatacctaataaatgcatagttgaaagtaggtctgaatgtgatacaactatccaatttggtccgaaaaaattcaagctacctgtagttcctgcaaatatgcaaacagttatgaatgagaaattagcgaaatggtttgctgaaaatgattacttttatatcatgcatcgttttgatgaagaagcaagaataccttttataaaaaatatgcaaaattcaggcttatttgcatctatttcagttggtgtaaagaaagcggaatttgattttattgaaaagttagctcaagaaaaattaatccccgaatatattacaatagatattgcgcatggtcactcggattcagtgataaacatgattaaacatattaaaacccatatacctgatagttttgttattgctggtaatgttggtacgccagaaggtgttagagaattagaaaatgctggtgctgatgctaccaaagtcggtataggtcctggtagagtttgtattacaaagattaaaacaggttttggtactggtggttggcagttagcggcattaaacatatgtagtaaagcagctcgtaaacctttgattgccgatggtggtataagaacgcatggcgacatcgctaagtcaattagatttggtgcatcaatggtcatgattggttcattatttgcggcacacgaagaatcacctggtgaaactgtagaacttgatggtaaacagtataaagaatattttggtagtgcatctgaatttcaaaaaggcgaacataaaaatgtagaaggtaaaaaaatgtttgtagaacataaggggtcattaatggataccttaaaagaaatgcaacaagatttacaaagctcaatttcatatgccggtggaaaagacttgaaatcattacgtactgtagattatgttattgttagaaactctattttcaacggtgatagagattaatatttatagtaggtgatgtaaattaaaaaattcatagtaactgttgttgcgtttttatcaattattatcattgcgccaataacagaatttaaaccattcattcatttacaaaatgaagtaagacaatatattgacattcacatcaataaagaaacaatttctgcggaaaataaattggatacgcctaagaaacaacaatttgcctttaataatattcagatgaatatgtcaaagtcagatgttgagaaaacattgaataaaccaaaaagagtgacatttaatgaatatggtacgaagtggtatacgtattatgatgacgattacaataattttataatgataagttacattaaagataaagttaatgcgttatatacaaatcaaaatatcatcacttcaaaatcaaaaattaaatacaatacaccgaaatcggttgtaaggcaaagattaggcgaaccagaaacagagattgttaaaggtagagtacgttacgaacaaaataataaagaatatgatgttttccataaaaatcacatttatacgacggtattttatgataagcatcaacgtaataatgtaacagctgttttacaagtaagtgatgctatggaaaatagattaaaagaacaatatggggcaccttcgaaatcgcttgcagatagttttgaactacaaaattttgatttagttaatgctgaaagaaaacaacatcaattatctacattgaagtattctaaacagaattctgaaactgctcgtaagcatagtaaagatatggccaaaaatcattattttgatcatacaaatttaaaaggtcaatcaccatttgatcgattgaaaaaagatggtattacatttaactcagccggagagaatttagcatatggtcaagttagtagtatctatgcacatcaaggattaatgaattctattggtcacagaaaaaatattttaaatgatacgtttaaaatattaggtgttggtgttgattttaatgatgaaaaacaacctttttggacagaaaattatactggttaatgtttttggtatgagtttaaagggtaatgtttgtctgtaaggaagtagataaacatgatgacaacagataaaccaaaagatgcggatatacttgaacgcgtcaaagatatacttaataaaaaagaaagaaaaaaataataatggctcgctcctgtaaattattacgggggcgagttttaatttgtgtaacattttgcaggaatctgtaattcaaaatttatattaaagaatgagattatctaacaattcgcaatttctgtttgaactgaatttagattagaataaataaaacctcttgaaaacgaaactttttcaagaggtccaaaatttataaaaatgagggtttaacaattacgataatatataacggtttaaaatattacatttcgcggtacaaaccaattactttcccaattacagcaacattgtcgaggtaaattggctccattgtactattttcaggttgtaatcgataacgatttttttctttatagaagcgtttgacagttgcttcatcttcctcagtcatagcaacaataatgtctccattttctgctatggtttgactgcgaacaattactttgtctccgtctaatataccagcctcaatcatactgtcgcctacgacgtttaatatgaatatgtcgctattatgtgtcgatgttaagtgttcaggtaatggaaaatactcttcaatattttctacagcggtaataggaacacctgctgtgactttaccaataactggcacatgaatcgtttcttccatattaatattatcatttgtttgatcacttacaatttctatagcacgtggtttcgttggatctcttcttatataacctttttcttcaagacgtgaaaggtgaccatgaacagttgaactggatgctaagccaactgcttcaccaatttcacgaacactaggcggataacctttcatttgaacaacttgtttaatatagttatatatttcgctttgtcgttttgttaattctctcatatataggcactccctaaattaatttaaatacagtatatcattaattcacaaccaaaacaaacatttgttcgttaaaatatcgacacagaacataagttctgataaattacttatacaaacaaatgttctaggagtgaaaatgatgttttacaataaatataaaaacgtatcaacatatatcatcatatttttagtttcaagtgcagcctttgcaatattcttgttaagtgcgaacgttagtgctcactcggaacaagtgtacgaaatgactgaccatcaaattaagaacaatacgataaataaagtatacgaacataaagaccctacaaacaatagcgaacaaagagatgggaaagtgttcgctttaataaattgatacattgtcacaacgttattttgcctatttttgcaaaatagcgttttttattacttttttgctgaacttaaatttgttatattttgttaaagtattataatgattgaataaacaaattgaaggtaggttttttaattgagtaattctgatttgaatatcgaaagaattaacgagttagctaaaaagaaaaaagaagtaggattaactcaagaagaagcaaaggagcaaacagccttaagaaaagcttatcttgagagttttagaaaagggtttaaacaacaaattgaaaatactaaagtaattgatccagaaggtaatgatgtaacacctgaaaaaattaaagagatacaacaaaaaagagataataaaaattaaatcacaaatctgtaaagaattttctgacattataacttggaataagtattttacttatctttttattttaaaataagttataatgtatttgataaaattgaagaagggaagatacacaagatgtttaatgaaaaagatcaattagctgttgatacgctacgtgcactaagtatcgacacaatcgaaaaagcgaattctggtcatccaggattacctatgggagctgccccaatggcttacactttgtggacacgtcatctgaattttaatccacaatctaaaggttacttcaatagagaccgtttcgtattatcggcagggcatggttcagcattattgtatagcttgttacatgtttctggtagtttagaattagaagaattaaagcaatttagacaatggggttctaaaacaccaggccatcctgaatacagacatactgatggtgtagaagttactactggaccacttggacaaggttttgctatgtcagtaggattagctttagcagaagatcacctagcagggaaatttaataaagaaggatataatgttgtagatcattacacatatgtattagcttctgacggtgatttaatggaaggtatttcgcatgaagcagcttcatttgctggacataataaattaagtaaattagttgttttatacgattcaaatgatatttcattagatggcgaattaaacaaagctttttctgaaaacacaaaagctcgttttgaagcatatggttggaattacttactagttaaagatggtaatgatttagaagaaattgataatgcgattactactgctaaatctcaagaaggaccaacaattatcgaagttaaaacaacaatcggatttggttcaccgaataaagcaggaactaatggtgttcatggggcacctttaggtgaagatgaaagaaaattaacattcgaaaattacggtttagatcctgaaaaacgttttaatgtttcagaagaagtatacgaaattttccaaaatactatgttaaaacgtgctaatgaagatgaatctcaatggaattcattattagaaaaatatgcagaaacatatcctgaattagcagaagaatttaaattagcgattagtggtaaattgcctaaaaattataaggatgaactaccacgttttgaacttggtcataatggtgcatctcgtgctgattctggtactgttattcaagcaatcagtaaaactgtcccttcattctttggtggatcagcagaccttgctggttcaaacaaatccaatgtaaatgatgcaacagattatagttctgaaacacctgaaggtaaaaatgtgtggtttggtgtacgtgaatttgctatgggtgctgctgtaaatggtatggctgcacatggaggtttacatccatatggtgcaacattcttcgtatttagtgattatttaaaaccagcgttacgcttatcatcaattatgggattaaatgctacgttcatcttcacacatgattcaattgcagtaggtgaagatggtcctactcatgaaccaattgaacaattagctggactaagagccattccaaatatgaatgttatccgtcctgcagatggtaatgaaacaagagtagcatgggaagttgccttagaatctgaatctacacctacttcattagtattgacacgtcaaaacttaccggttttagatgtaccagaagatgtagttgaagaaggcgttcgaaaaggtgcctatacagtttatggctctgaagagacaccagaattcctattattagcttcaggttcagaagttagtcttgcagttgaagctgctaaagatcttgaaaagcaaggtaaatcagtgcgtgttgtttcaatgcctaactggaatgcatttgaacaacaatctgaagaatataaagaatcagttattccatcaagcgtaacaaaacgtgttgcgattgaaatggcttcaccgctaggatggcataaatatgtaggtactgcaggtaaagttattgctattgacggctttggcgcaagtgcacctggcgatttagtagttgaaaaatatggctttacaaaagaaaatatcttaaaccaagttatgagcttataagaataatttataaagcgagtatgtttagaagtctaggatgcataatcttaggcttcttttaaagtggtgaaatttagagtatagcactcaaactacaccataagtgataacttttgaaaatatactatttcagattaatctttaaaacctctgttataacagcatgatttttgatattatttttagtatcgatattaaaatacttgaataaactagttcttgaaataatgtgatgaatttagtaaaattcagtaggataaagaaagcgggtgaaacaatggcaacttggttagcaattatttttatagtagctgcattaattttaggtttaattggaggtttccttttagctagaaaatatatgatggactacttgaagaaaaacccaccaatcaacgaagaaatgcttcgtatgatgatgatgcaaatgggtcaaaaaccttctcagaagaaaattaatcaaatgatgacgatgatgaataaaaatatggatcaaaatatgaagagtgcgaaaaagtaaattcgcaattgatagaggctattttccagatatggaaatggcctctttttataatcaaattaataagaataaatatgtttattaaaattaaagttaacaaaatgacgaatagactgagaaatgctataattcattttgtatgatttacagagagtttatttaacgagaaggtgtctgcgtgctctatttaatattttcaatcattgtagctttatttatgggaactatagttatagttattcgtatgaaagctcaaaattatccggtaaatgagaaaaaaatagttttgccaccgttttttatggcgactggtgcattgatgtacgtcgttccatattttaggctaacaggatcggaaatgctagaagcctttataattggtttgcttttttctacagttctaatttggacttctcgatttgaagtcaaaggtacagaaatttatatgaaacgatctaaagcatttccagttattttgatttcattacttatcattcgtactgtgatgaaaatattcattagtaatgaaatagatcctggagaattaggcggcatgttctttttattagcattctgtatgattgttccttggagagcagcaatgctatataaatacaaaaaactaaagaaaacattaatcaattaattacttttaaaaccacttgtgatcgacttttaaatcagtcgatgagtggttttaattttacttgaaaaggtgaaatgtttatattaaaataaaagcgaacaaatgttctatatggaggcagtaatgaaaattatacatacagcggactggcacttagggaaaatattaaatggcaaacagcttttagaagatcaagcttatattttagatatgttcgtagaaaaaatgaaagaagaagaacctgatatcattgtgatagctggagatttatatgacacaacatatccaagtaaagatgcaatcatgttattagaacaagcgattggaaagctaaatttagaactgcgtataccaataattatgattagcggaaatcatgatggtaaagagagattaaactatggggcgagttggtttgaacataatcagttatttataagaacagattttacatcgattaattcgccaatagagataaatggggttaatttttatacactcccttatgctactgtgagcgaaatgaaacactattttgaagatgacaccattgaaacgcatcaacagggaattacgcgctgtattgaaacaatagcaccggcaattgatgaagatgccgtcaatattttaattagtcatctgactgttcaaggtggaaagacatctgattctgaaagaccattaactattggaacggttgaatcagttcagaaaggtgtttttgatatatttgattatgtcatgctaggtcacttgcatcatccatttagtatagaagacgacaaaattaaatatagtggctccttattgcagtattcattttcggaagcgggtcaagctaaagggtatagacgtgtaacaattaacaatggcattattaacgatgtatttattcctcttaagccacttagacaattggaaattatctcgggcgaatataatgatgttattaatgaaaaagttcatgtgaaaaataaagataattatttacattttaaacttaaaaatatgtcccatattactgatccaatgatgagtttaaaacaaatttatcctaatactttagcgctgacgaatgaaacttttaattataatgaagaaaataatgctatagaaataagtgaaaaagatgacatgtcaatcatcgaaatgttttataaacatataactgataaagaattatcggatatccaatctaaaaagataaaaaatattttagaaaacgaattgagaaaggaggattaatgaatgaaaccattacatttaaagttgaataatttcggcccctttttaaaagaagaaattgatttttctaaaattgataataatgaattgtttttaataagtggtaagactggatcgggtaaaacaatgatttttgatgcaatgacttatgccttgtttggtaaagcatcaactgaacaaagagaagaaaatgatttgagaagtcatttcgctgatggtaaacagccgatgtcagtaacgtttgaatttcaattaaatcatcgaatttataaagtgcatagacaaggcccttatatcaaagaaggtaatacaacaaaaacgaacgctaaatttgatgtatttgagatggtggatggcaagtatgaaattagagaaagtaaagtaatttcaggtacccaattcattattgaattattaggagtaaatgcagatcaattccgacaattgtttattttgcctcaaggtgaattcaaacgctttttaatatcaaacagtcgtgaaaagcaagggatattaagaacactgtttgacagtgaaaaatttgaagctatacgagaaatattaaaagaagaagtaaaaaaagaaaaagctcaaatcgagaatagatatcaacaaattgaccttttatggcaagaaattgaatcatttgatgatgacaaaataaaaagcttattagaggttgccactcaacagatagacaaagtgattgaaaatataccacttttacaagctaggtcgaaagaaatactagcatttgtaaatgaaagtaaagaaactgctattaaagaatatgaaataatagaaaagaaaacactagaaaataatatattaaaagataatattaatcaactcaacaaaaataaaattgatttcgttcaattgaaagagcaacaacctgaaatagaggaaattgaagctaagttaaagttgttacaagatattacaaacctattgaattatattgaaaatagagaaaaaattgaaactaaaattgctaaaagcaaaaaagatatttctgaaaccaataataaaatattgaaccttgattgtgataagcgaaacatagacaaagagaaaaaaatgttagaagaaaatggagatttaattgaaagtaaaatctcttttattgataaaactagagtattatttaacgacattaataagtatcaacaaagttatctcaatattgaacgcttgagaactgaggatgaacaattaggtgatgaattaaataatctaattaaaggtttagaaaaggtcgaagattcaataggtaataataaaagtgattacgagaaaattatcgaactaaataatgcgataactaacataaataatgaaattaatgtaattaaagaaaatgaaaaagctaaagatgaattagataaactattaggtagtaagcaagagttagagaatcaaattaatgaagaaaaaactatattgaagaatctcgaaataaaattagattgctatgataaatcaaaattggacttaaatgataaagaaagctttataagtgaaattaaatctgctgtaaagattggagatcaatgtccgatatgtggtaatgaaattcaggatttagggcatcatattgattttgacagtattgctaaacgtcaaaatgaaattaaagaaattgaagcaaatatccacactatggaatcgaatattgctgtgcataattctgaaattaaatttgttaatgaaaaaatatcgaatattaatattaaaacgcaaagtgatctttcactcgaagtattgaataagcgtctgctagaaaatgaaaatgcattgaataatcaaagagatcttaataaatttatagaacaaatgaaagaagaaaaagataatctaacgttgcaaattcataataaacaattgcgtctaaataaaaatgaatctgagttgaaaatatgtcgagatctcatcactgaatttgaaacactctcaaaatataataatatcactaattttgaagtggattataagaagtatgttcaagatgtgaatcaacatcaagaacactcaaaggagattgaagataagttaatacaattgtctcaaagaaagttaattgagcaaaataatctaaatcactatgaaaatcaactagaaacttacaataatgacttagaattgaatgaacaatctattgaaatggaaatgtcgaggctgaatttaactgacgacaatgatataaatgaaataaaagcctggaggggcgagcaagaggaattagagcagaaaagggatacttataaaaaacgttatcatgaatttgaaatggaaatcgctaggttagaatcattaaccaaggataaagagttattggactctgataaattaaaagatgactatgaactaaaaaaaggaaagatgaatacactgatagatgaatactctgctgttcattatcaatgtcaaaataatattaaaaaaacacaatctatagtttcgcatattaattacttaaatcaagaattaaaggatcaacaagaaatatttcaattggctgagattcttagtggtaagaataacaaaaatcttacattggaaaactttgtcttaatttactatttagatcaaattattgctcaagcaaatctgagattagcaacaatgtcagataatcgataccaactaattaggcgagaagcggtttctcatggtcttagtggcctagaaattgatgtatttgatttgcattcaaataagtctagacatattagctcgttatcaggtggagaaactttccaatcgtcgcttgcattagctttagggttaagcgaaattgtacagcagcaatcaggaggtatttcactagaatcaatatttattgatgaaggattcggtacattagatcaagaaacgcttgaaacagcgttagacactttgttaaatcttaaatcaactggtagaatggttgggattatttcacatgtgagcgaattgaaaaatagaatacctttagttttagaagtgaaatcagatcaatataagagttcaacaagattcaaaagaaattaaaacataaaaaatagagatggtactttggaatgtatagaacaaccttagcccatctctttttatttaaaaattattttttctcacgtaataaatctctgatttcagttaataacacaacattttcttccacaactgcttcttcttcggcttcttctttcttcattaatgtatttgcaatcttaacaaagatgaataaagcaaacgcgatgataataaagtcgataacagattggataaataaaccgtatttaataccccagaatgaccattctttagcaaaatcaactgatccgaaaattttaccaattaatggcatgatgatattttctactaatgaagatataatcttgttgaaagctgcacccatcacaacagcaattgctaaatctaagacgttaccttttaaggcgaactctttgaattcttttaacattacactcaacctctcttttttaaatgtaacctcaattatacaacaaataaaaaaattagaaaatagattattcaagaaaatttgattatcgcaaagacctttgttatcctataaaggtgcgtgagttattgaataaaatgtttagataatatttttattctactacataaaattaaatatagaattgaagggagtaattaattatgaattcttcttcaccagagaatccaaatggaaagaagtattcaccagtcttcatctatagtgcaattgttgttgctatagtcgtattacttggtgcatttttacctgaacaattcaactatgttaccaataatattaaaatgtggattacagaaaaattaggttggtattatcttattcttactacgattatcgtgttcttctgtatattccttatttttagtcctattggaaaacttaaactaggtaaaccaaatgacaaacctgagtttaatacaatttcatggtttgctatgttgtttagtgctggtatggggataggtttggtgttttatggtgcagctgaaccgatggcgcactttgctacgccacctacagcagatcccaaaactactgaagcttatactgaagctctacgttcaacatttttccattggggattccatgcttgggcagtttatggtgttgttgcgttagcgttggcatattcgcaattccgtaaaggtgaaccaggtttattatctagaactttacgtcctcttttaggtgataaagtagaaggacctattggtatttttattgacgttttatctgtatttgcgacaatcgttggggtagccgtttcgttaggtatgggtgctctacaaattaatggtggtttacattacttgttcaatgttccaaacaatacgtttgtacaagcgattatcatcattgttgttactatcttatttatagcaagtgcatggtcaggattaagtaaaggtattcaatacttaagtaacttgaacatcggtttgggtactattttaatggtagctgctttaattgttggaccaactgttcttattttaaatatgttaactagctctacgggtagtttactaaacacattcttgtttaatagttttgatacagctgctttaaatcctcaaaaacgtgaatggatgtcttcatggacactttattactggggttggtggttaagttggagcccatttgttggagtgtttattgcacgagtttcaaaaggacgttcaattagagagttcatttctggtgtcttgctagttccagcaattgttagttttgtatggtttagtgtctttggtgtattaggcatcgaaacaggtaagaaacacaaagaaatttttgatatgactcctgaaacacagctatttggagtgtttaatcatgtgccatttggcattgttttatcgttgattgcattattattaattgcatcattctttattacatctgctgactcagcaacatttgtattaggaatgcaaacaacatttggctcattaaatccatctagtatggtaaaagttgtttggggaatttcacaggccttaatagcatttgtacttttattagctggtggcggtaacggcgctgaagctttaaatgcgattcaaagtgctgcaattataagtgcattcccattctcctttgtcgtcatactcatgatggtaagtttctacaaggatgcgaaccaggaacgtaaattcttaggtttaacattgactccgaataaacaccgcttacaagaatatatcaagagtcaacaagaagattatgaatctgacattcttgaaaagcgtcagtcacgtagaaatatagagaaaaaagataactaataaaatttagttaagtattttaataacaagtagtatgtcattctagtagctagaacagatatactacttgtttatttttgtggaaaattgagtatattcaaaaggataagaacgagaatttcgctattaaactacgaattctcgatttttttattttaaaataggtttatttatgacaacttaatagaaagggttttgacaaagataaagtgaagtacgacggtataaacaaaaattaactatacttttatagaaaattaactcagactgggacataaatcaatattctatgctctacgaagttatattggcagtagttgactgaacgaaaatgcgcttgtaacaagcttttttcaattctagtcaggggccccaacacagagaatttcgaaaagaaattctacaggcaatgcgagttggggtgagggctccaacacagaagctgacgaaaagtcagcttacaataatgtgcaagttggggtggtgcgacgaaataaattttgcgaaaatatcatttctgtcccactcccatcaaaagaatgacattgaaaaagaaatattaaagtttggcggcataattttctttctgctcaatgaaataatacgtttaaaaattgaatcattcgcgaaattgataattattctcaattaataaagaatacttattacaccttacctgaacgataagttttacttatatgctctgattaaaaagtcaaaacctaaattaagcgttttctaagcatgatgagttgtttatcaataaatataataatacaatttaatcaaggcatataaatataaaaatgtatcaagggggatcattaaatggctgcaaattttaaagagcaatcaaaaaaacattttgacttgaatggccaaagttatacttactatgatttaaaagctgtagaagagcaaggtattactaaagtttcgaatttaccttattcaattcgtgttttgttagaatctttacttcgtcaagaagatgattttgtaattacagacgatcatattaaagctttaagtcagtttggaaaagatggaaatgaaggcgaggtaccatttaaaccttctcgtgttattttacaagatttcacaggtgtaccagccgtagttgatttagcttctttacgtaaagcaatggatgacgttgggggagatattactaaaattaatccagaagtaccggtggatttagttattgaccactcagttcaagtggatagctatgcaaatccagaagcacttgaacgtaatatgaaattagaatttgaacgtaactatgaacgttatcagtttttaaattgggcaacgaaagcatttgataattacaatgcagttcctcctgcaactggaatagttcaccaagttaacttagaatatttagcaagtgttgtacatgttcgtgatgtagatggcgaaaaaactgcatttccagatacattagtcggtactgattcacatacaacaatgataaatggtataggcgtactaggatggggtgttggtggtattgaagctgaagctggaatgcttggacaaccttcttatttcccaattccagaggttattggtgtacgactagtaaattcattaccacaaggcgcaacagcaactgatttagcgttaagagtaactcaagagctacgtaaaaaaggtgttgttggtaaatttgtagagttctttggtccaggtgtacaacatttaccactagcagaccgagctacaattgcaaacatggcgccagagtatggagcaacttgcggattcttcccagttgatgatgaatctcttaaatatatgaagttaactggtagatcagacgaacatatcgcgctagtaaaagaatatttgaaacaaaaccatatgttctttgatgttgaaaaagaagatcctaattatacagatgttatcgaattggatttatcaacagttgaagcatcgctttcaggaccaaaacgtcctcaagatttaattttcttaagtgatatgaaatcatcatttgaaaattctgtaacagctccagcgggcaaccaaggacatggtttagataaaagtgaatttgataagaaagctgaaattaacttcaaagatggatcaaaagctacaatgaaaacaggtgatattgcaatagcagcaattacatcatgtacaaatacatctaacccttatgtaatgttaggtgcaggtttagttgctaaaaaagcagttgaaaaaggcttgaaagttcctgaatacgttaaaacttctctagcaccaggatcaaaagttgttaccggatatttaagagatgctggcttacaaccttatttagatgatttaggctttaacttggttggttatggatgtacaacttgtatcggtaattcaggtcctttattaccagaaattgaaaaagcgattgctgatgaggacctattagtgacatctgtattatctggtaaccgtaactttgaaggtcgtatccatcctcttgtaaaagccaattacctagcttcaccacagttagttgttgcttatgcattagctggaacggttgatattgatttacaaaatgaacctattggtataggtaatgacggtgaagatgtatatttgaaagatatttggccatcaattaaagaagtttcagataccgttgatagtgttgtaacacctgaattatttattgaagaatataataacgtatacaataacaacgaattatggaatgagattgatgtaactgatcaacctctatatgactttgatcctaattcaacatacattcaaaatccatcattcttccaaggattatctaaagaaccgggtacgattgttccattaaatggtttacgtgttatgggtaaattcggtgattctgtgacaactgaccacatctctccagcaggtgcaattggtaaagatacgccagctggtaaatatttacaagatcatcaagtgcctattcgtgaatttaattcatatggttcaagacgtggtaatcacgaagtaatggttcgaggtacgtttgctaatatacgtattaaaaaccaattagcgccaggtactgaaggtggttttacaacttattggccaacaaatgaagtaatgcctatctttgatgctgcaatgaaatataaagaagatggtacaggtttagttgtattagctggtaacgattatggtatgggttcatctcgtgactgggcagcaaaaggtacaaacttattaggtgttaaaacagttattgcacaaagttatgaacgtatccatcgttcaaatttagttatgatgggtgtattaccattagagtttaaaaaaggtgaatcagctgattctcttggtctagatggtacagaagaaatttctgttaatattgatgaaaatgttcaaccacatgactacgtcaaagttactgctaagaagcaagatggtgatttagtagaatttgacgctatggttcgttttgactcacttgttgaaatggattactatcgtcacggtggaattttacaaatggttttaagaaataaattagcgcaataaaaatagatatcacagtaaaattttaatcggtatttgaggcactttgatagtgctcaaaaacacctctataaactttatgatttaataggtcggttcaaaacctttgtgttcttggccggcctattcttgtatattatgttagaatgagatataaagttaaactgaaagaaggcttaaaatgatatatagtattacagaaatagaagcgcgttatgctgaaactgataagatgggtgtaatttatcacgggaattatgcaacttggtttgaagttgcgcggttggattatatatcgaagttaggttttagttatgctgatatggaaaaacaaggaatcatttcacctgtgactgacctcaatgtcaattataaaaagtctattttttatccagaaaaagttaaagttaaaacttgggttgaaaaatattcgagattacgttcagtgtataaatatgagatttttaatgaaaaaggtgaacttgcaactacaggttccacagaattgatttgcattaaagaagatacttttaagcctatacggttggatcgttatttcccagattggcatgaagcctatagtaaagtgcaaacgctcaataatgaagggaaaacagtagagataatggatggtattgattctttataagttactataaatgtttggagaggcaatattaacaattaatctataaaaaatagccaatacgttaacattaatgtaattagcgtgaagataagttaatatatagcaaaaacgaacttgttcatacaacatcagatgtgttaaaccaaagtacaacttgtgaggttcagtacacatcagaatgtgtaaacaagttcgttttattttagttattttgtggaataagaaatttcatcttcgtgatcaactacatttacaataatgtggtcatcttcaaagtaccacaaatctttttccgctacgacaacatttaaatcgtcatattgttgttcatagccaatatcaacatcttcctttggttcaactgtaaaagcaggactaaatccttgcttgagttggaattcgccaccatatcttacaaaaaacacgagcactttattattttcaggtaactcaagttcatttttaaaccaagttactgctgcatcagtaagttctatttgcataacaatgacctcctatatttattacagaatgggagtgggccccaattcatattgtttgtgggatttcttttcgaaattctctgtgttggagcccaccccaacctgcacattattgtaagctgaatttccataagcttctatgttgggacccccgaccagaattgaaaaaacctagttataagcgcatttcattctgtcaactacagctaatataacattgtgtagcctatgacattgatctatgtctcggtctcaaatgttcttgtaaaaaaactaagtatagttgaattttaagttaaaaaaattgtttttgcaaaaataaaataatccatcaactgcaaaaaaatatgcaatgatggactaatgtcaaaaaattgttacatccattttattttaggttcttcgcctctaaaaattcttgcgatattagagcgatgtctaattatcaatatgattgaaactaagaaactaacgactaataaaatatagtcttgaatgataagcgagccaattacacagcaaattgctgcaacgatacttgctaaagaaacatatttaaaaatcttcaatacaataaagaagataattgcaagtattagtaaaagtatcgggttgactcccaagacgacacctgcactagttgcaaccgctttgccaccttggaattttaaataaacaggataaacgtgtccaagtatagcgaataagccaacaattaaaccatttgtaaaaaaagtactaatagggccatctgcgtgaactggtaaccataaagggaagaaaacagttatgaaccctttgaaaatatctagaaatgttaccaagaatcctgcaggacgacctaatactctaaagctattagtagcgccagtattaccactaccaaattgtctaatatcttttttgaaaaataattttccaattacgaatccacttgggaaagcgccgataagataacttagtagtaacatgacgattatcatcataaatattacacatcctttaatatcttaggactattttatcatattcgtttaaattacggctaaaatttttaaaaacagggattaatatatggaattaagctatgaaagttaattgatacttgcattttacgctgatttatataagaataactattgtatagttttaaaaacgaacgtacgtttgcaggaggcgaaatcattggcaatgaataaacaaaataattattcagatgattcaatacaggttttagaggggttagaagcagttcgtaaaagacctggtatgtatattggatcaactgataaacggggattacatcatctagtatatgaaattgtcgataactccgtcgatgaagtattgaatggttacggtaacgaaatagatgtaacaattaataaagatggtagtatttctatagaagataatggacgtggtatgccaacaggtatacataaatcaggtaaaccgacagtcgaagttatctttactgttttacatgcaggaggtaaatttggacaaggcggctataaaacttcaggtggtcttcacggagttggtgcttcagttgtaaatgcattgagtgaatggcttgaagttgaaatccatcgagatggtaatatatatcatcaaagttttaaaaacggtggttcgccatcttctggtttagtaaaaaaaggtaaaactaagaaaacaggtaccaaagtaacatttaaacctgatgacacaatttttaaagcatctacatcatttaattttgatgttttaagtgaacgactacaagagtctgcgttcttattgaaaaatttaaaaataacgcttaatgatttacgcagtggtaaagagcgtcaagagcattaccattatgaagaaggaatcaaagaatttgttagttatgtcaatgaaggaaaagaagttttgcatgacgtggctacattttcaggtgaagcaaatggtatagaggtagatgtagctttccaatataatgatcaatattcagaaagtattttaagtttcgtaaataatgtacgtactaaagatggtggtacacatgaagttggttttaaaacagcaatgacacgtgtatttaatgattatgcacgtcgtattaatgaacttaaaacaaaagataaaaacttagacggtaatgatattcgtgaaggtttaacagctgttgtgtctgtacgtattccagaagaattactacaatttgaaggacaaacgaaatctaaattgggtacttctgaagcaagaagtgctgttgattcagttgttgcagacaaattgccattctatttagaagaaaaaggacaattgtctaaatcacttgtgaaaaaagcgattaaagcacaacaagcaagggaagctgcacgtaaagctcgtgaagatgctcgttcaggtaagaaaaacaagcgtaaagacactttgctatctggtaaattaacacctgcacaaagtaaaaatacagataaaaatgaattgtatttagtcgaaggtgattctgcgggaggttcagcaaaacttggacgagaccgcaaattccaagcgatattgccattacgtggtaaggtaattaatacagagaaagcacgtctggaagatatttttaaaaatgaagaaattaatacaattatccacacaatcggggcaggcgttggtactgactttaaaattgaagatagtaattataatcgtgtaattattatgactgatgctgatactgatggtgcgcatattcaagtgctattgttaacattcttcttcaaatatatgaaacctctcgttcaagcaggtcgtgtatttattgctttacctccactttataaattggaaaaaggtaaaggcaaaacaaagagagttgaatacgcttggacagacgaagagcttaataaattacaaaaagaacttggtaaaggcttcacgttacaacgttacaaaggtttgggtgaaatgaaccctgaacaattatgggaaacgacgatgaacccagaaacacgaactttaattcgtgtacaagttgaagatgaagtgcgttcatctaaacgtgtaacaacattaatgggtgacaaagtacaacctagacgtgaatggattgaaaagcatgttgagtttggtatgcaagaggaccaaagtattttagataattctgaagtacaagtgcttgaaaatgatcaatttgatgaggaggaaatctagtgagtgaaataattcaagatttatcacttgaagatgttttaggtgatcgctttggaagatatagtaaatatattattcaagagcgtgcattgccagatgttcgtgatggtttaaaacccgtacaacgtcgtattttatatgcaatgtattcaagtggtaatacacacgataaaaatttccgtaaaagtgcgaaaacagtcggtgatgttattggtcaatatcatccacatggagactcctcagtgtacgaagcaatggtccgtttaagtcaagactggaagttacgacatgtcttaatagaaatgcatggtaataatggtagtatcgataatgatccgccagcggcaatgcgttacactgaagctaagttaagcttactagctgaagagttattacgtgatattaataaagagacagtttctttcattccaaactatgatgatacgacactcgaaccaatggtattgccatcaagatttcctaacttactagtgaatggttctacaggtatatctgcaggttacgcgacagatataccaccacataatttagctgaagtgattcaagcaacacttaaatatattgataatccggatattacagtcaatcaattaatgaaatatattaaaggtcctgattttccaactggtggtattattcaaggtattgatggtattaaaaaagcttatgaatcaggtaaaggtagaattatagttcgttctaaagttgaagaagaaactttacgcaatggacgtaaacagttaattattactgaaattccatatgaagtgaacaaaagtagcttagtaaaacgtatcgatgaattacgtgctgacaaaaaagtcgatggtatcgttgaagtacgtgatgaaactgatagaactggtttacgaatagcaattgaattgaaaaaagatgtgaacagtgaatcaatcaaaaattatctttataaaaactctgatttacagatttcatataatttcaacatggtcgctattagtgatggtcgtccaaaattgatgggtattcgtcaaattatagatagttatttgaatcatcaaattgaggttgttgcaaatagaacgaagtttgaattagataatgctgaaaaacgtatgcatatcgtcgaaggtttgattaaagcgttgtcaattttagataaagtaatcgaattgattcgtagctctaaaaacaagcgtgacgctaaagaaaaccttatcgaagtatacgagttcacagaagaacaggctgaagcaattgtaatgttacagttatatcgtttaacaaacactgacatagttgcgcttgaaggtgaacataaagaacttgaagcattaatcaaacaattacgtcatattcttgataaccatgatgcattattgaatgtcataaaagaagaattgaatgaaattaaaaagaaattcaaatctgaacgactgtctttaattgaagcagaaattgaagaaattaaaattgacaaagaagttatggtgcctagtgaagaagttattttaagtatgacgcgtcatggatatattaaacgtacttctattcgtagctttaatgctagcggtgttgaagatattggtttaaaagatggtgacagtttacttaaacatcaagaagtaaatacgcaagataccgtactagtatttacaaataaaggtcgctatctatttataccggttcataaattagcagatattcgttggaaagaattggggcaacatgtatcacaaatagttcctatcgaagaagatgaagtggttattaatgtctttaatgaaaaggactttaatacagatgcattttatgtttttgcgactcaaaatggcatgattaagaaaagtacagtgcctctatttaaaacaacgcgttttaataaacctttaattgctactaaagttaaagaaaatgatgatttgattagtgttatgcgctttgaaaaagatcaattaattaccatcattactaataaaggtatgtcattaacgtataatacaagtgaattatcagataccggattaagggcagctggtgttaaatcaataaatcttaaagctgaagatttcgttgttatgacagaaggtgtttctgaaaatgatactatattgatggccacacaacgcggctcgttaaaacgtattagttttaaaatcttacaagttgctaaaagagcacaacgtggaataactttattaaaagaattaaagaaaaatccacatcgtatagtagctgcacatgtagtgacaggtgaacatagtcaatatacattatattcaaaatcaaacgaagaacatggtttaattaatgatattcataaatctgaacaatatacaaatggctcattcattgtagatacagatgattttggtgaagtaatagacatgtatattatctaaaaactatatgcaatcacgaaattaaatgataaaatacagtaatgttaaattttgacttaattcaagggatttatattaaatgctgaccaagtacttatcgttaaattagcgatatactttgaccaaactaatataaatctcttgtattgtataagaaatgatgatgtatctctatatttactgaagtttcaattcggtctaattttatagaaggtgcataattcatgtagaggatgcgaggggtttattttgaaagatttcgatagtttaattcctggatggtttaaagaatttgtccatgttggtaccgatctaatatggtctcaatatttaattggtctattattgacagctggattcttctttacaattagttctaaattcgtccaattacgaatgttacctgaaatgtttagagctttagtagaacgtccagaaactttagaagatggtaagaagggtatttcgccattccaagcatttgcgattagtgctggttcgagagttggtactggtaatattgctggtgttgcgactgcgattgttttaggcggtccaggtgcagtattttggatgtgggttattgcatttataggtgcagcgagtgcatttatagaagcgactttggctcaggtttataaagtacatgataaagatggtggattccgtggtggtccggcttactatattactaaaggtttaaatcaaaaatggctaggtatcgtatttgcgattttaattacaattacatttgcatttgtatttaacacagtgcaatctaatacaattgcggagtcgttaaatacgcaatataatattagtccagtaatcacaggtattattttagcaatcgtaacagctattattatatttggtggtgtacgtagtattgctacgttatcttcgttaattgtaccgattatggctatcatttacattggtatggttttagtaatattgctatttaatttagatcaaattgttcctatgataggtacgattattaaaagtgcatttggtatcgaacaagtaactggtggcgctgtaggtgctgcggttcttcaaggtatcaaacgtggtttattctctaacgaagctggtatgggttctgcgccgaatgcagcggcaactgctgccgtaccacatcctgttaagcaaggtttaatccaatcattaggtgtgttctttgatacaatgttggtttgtacagcaactgcaatcatgattttactatattcaggattgaaatttggtgaaagtgcaccacaaggtgttgcagttactcaatcggcacttaatgagcatttaggttctgctggaggtattttcttaacaatagcagttacactgtttgcattttcatctgtggtaggtaactactattatggtcaatctaatattgaatttttatctacaaatcgtgtgatattatttatctttagatgtcttgttgtagtacttgtctttatgggagctgttgctaaaacagaaacagtatggaatacagcagacttatttatgggcttaatggcaattgtaaacattatttccattataggactgtccaatgtagcttttgcattaatgaaagattatcaaaagcagaaaaaagaaggcaagaatcctgtctttaaacctgaaaacttagaaattaacttatttggaattagtgcttggggcgctaacaaatataagaactctgataaataaatatttttaatgtaacgattcattttataaaaatcaaataaaccctgaggttttcaaattaaagcgaaaatctcaggattttaaatttgtactcaataatcatctgtatcattacactagttaatctaagatttgattaaatattaacataataagattgagatttatttcctccattggtgtgcaaagactataccattaataagacatattgttagatagatgaatataaatttattttagctttgcacaatttaatagtacgttttagtttgtattgagtattaattcagataatatataaataaatagaattatttgtaaatatgggagtcagatttttttattatagttattccactttgagaggcatcgaaattaaattaagatatatcatataggataggcgtgtaatagaacacaagtatttaaattattatactttcaagttagacatttccgatatataatcttaataatagaaaaataggtgatgataatgggagaatatattgttactaaaacattgaacaacaatgtcgtagtatgtactaataatgatcaagaagttattttaatcggtaaaggtattggttttaacaaaaaagagggaatggcgttaaacgaccaaactattacaatagagaaaatttataaattagagagtgagcaacaaaaagcacattataaaagtttagttgaaatcgctgatgacaatgtattacaagtaattattgattcgttaaattttatttctaatactgcgatgaatgttgattcaaaacaacttgtaatttcattaacggatcatattatatttgcatataaacgtttaaaacaaaatcaagttattagcaatccatttgttatggaaactatgcagttatatagtgatgcatatcatattgctaaacaggtgattgatcagttaaatgcagcattagatgtacattttcctgaagatgagataggatttattgcattacatattgcatctaacacagaagatttatctatgcatgagatgactttgatcaataatgttattaaaaaaggtatagatatcattgaatcagaccttgtgacaactgttgataaggaatcattacaataccaacgttttataagacatgtacaatttttaattcgcagattaagaagaaaagaatatatacatgcacaagatgattttgtgtctatgattaaaaatcactatccgatttgctataacacagcatataaaattttaactatgatacaaaaacaatttgatgttaatatcagtgagtctgaaattatatatttaacattacacattcatcattttgaagaaaggattaatcaatcctaaattaagtgtattacacgggcgtttcgttactgtaaagggtatttgtatggtatcattgatgttagtaattttacataagtggactgtttttatacaacatcttatgaatattttaagtggtggtgaatctataattgaatgaaaatgaaaagaatataagaaagaactttttaaaatttaccgaatcacggtatatgaagtttgttggtgggaatgatttagtcttctcattaatagcactagtattgttgggtattgttatttttattttcgaaaaagtatcatacgtttttgatccttttatcatcgtttttaagacgatagcagcacctatcatcgtctctttaattctattctatttatttaacccaatcgtaaatatgatggagcgttatagaataccaagagttgcaggtatttctattatttatctagctgtagtaggtgttattacgttaattgttaatttattgatacctattattggttcgcaagtagatagtttagttaaaaattcaccgcaatatctagaaaaattaattaattctattgataaaatagcaaataatacgtttttctcttcgtattatagtcaaattaatgattggttaaattctttacctaagaaaataccatctatgttaagtgaatttacagatggctttgggtctaaaattgcaacgtttgcagaaacgattgctaatattggcgttgtaattgtcacaacaccatttgtactattctttatgcttaaagatggacatcacttcaaagaattttcaacgaatattatgccaccgaaattccgaaaagattttcatgatctacttgaaaaaatgagtgttcaagtgggttcatacattcaaggacaaattattgtttcattctgtatcggtatactgttgtttatcggttattcggttatcgggttgaaatatagcttagtattagctagtattgcggcagttacaagtgttgtgccatatttagggcctactatagcgatttcaccagctattgtaatagctgctataacatcgccgtggatgctcttaaaattagcagtagtatggactttagtacaatttgttgaagggcacttcatttcaccaaatatcatgggtaaaacacttaagattcatccacttacaatcattttcattttactgtgtgcaggcaaattgcttggtattgtaggcgttattttaggtattccgggatatgctattttaaaagtattagttactcatttattccaattatttaaacgtcgatacaatcgtttctatggtaatgatgtaggtgaatatgatattaaagaaagtaataaaatagttgaataagtaattaaaaataccaatagactatacgtttgttggtatttttatggtgcttataatgttggggactcacatctatgattatcagcacatgtttagtttgtaaatttttacgaaagtttagccgtttataaagcacgtgcataatgaaacgagtatttgccacttgattagtacttcattattatgtcgaaaataaaaacaagtggtatttttaatatattaagaagcactcataattggctgttatttaataatatttttcataagtattgattcatcattttctttatgttaaatatgaatcagtatagataaccatattgttctgtttgagatagaattattttctatttacttcttaatacagatgtcaatatgacaaaagtgttatataaatcaaaggtaaatgatatgctatttttatggtttatatgatatattttgatttataacagaaataattagaattgatgtgaaaaaatgaatcaggaagttaaaaacaaaatattttcaatcttaaaaattacgtttgctacagctttatttatttttgtagtaatcacattgtatcgggagttatctggtattaactttaaagatacgttggttgaatttagtaagattaaccgtatgtccttagttttactatttattggtggtggggcatcgcttgttattctatcaatgtatgatgtgattttatctagagctttaaaaatggatatatccttaggcaaagttttaagagtgagttatatcatcaatgcattgaatgcgattgtaggtttcggtggctttattggtgcaggcgttagagcaatggtttataaaaactatacgcatgataaaaagaaattagttcactttatatccttaatacttatttcaatgttgacaggtttaagcttattatcattgttaattgtattccatgttttcgatgcatctttaattttagataagattacatgggtaagatgggtattatatgtagtgtcatttttcttaccattattcattatttattcaatggttagaccgcccgataaaaacaatcgttatgtaggcttgtattgtacattagtgtcatgtgtggaatggttagctgctgcagttgtattatacttctgtggtgtcatagttgacgtccatgtctcatttatgtcatttattgcaatattcattattgctgcattatctggattagtcagctttattccaggtggtttcggcgctttcgatttagttgtattactaggatttaaaactttaggtgtccctgaggaaaaagtattattaatgctactactttatcgctttgcgtactatttcgtaccagtgattattgcattaatcctttcatcatttgagtttggtacttcagctaagaaatatattgagggatctaaatactttatccctgctaaagatgttacgtcatttttaatgtcttatcaaaaggatattattgctaaaattccatcattgtcattagcaattttagtattctttacaagtatgatcttttttgtaaataacttaacgattgtttacgatgctttatatgatggaaatcacttaacgtattatattttattggcaattcatactagtgcttgtttattacttttactgaatgtagttggtatttataagcaaagtagacgtgccatcatctttgctatgatttcaattttattaatcacagtggcgacattcttcacttacgcttcatatattttaataacatggttagctattatttttgttcttcttattgtagctttccgtagagcacgtaggttaaaacgcccagtaagaatgagaaatatagttgcaatgcttttattcagtttatttattttatatgttaaccatatatttattgctggaacgttatatgcattagatatttatacgattgaaatgcatacatctgtattgcgctattacttctgccttacgattttaatcatcgctatcatcataggtatgattgcatggttgtttgattatcaatttagcaaagtacgtatttcttctaaaattgaagattgcgaagagattattaatcagtatggcggtaattatttgagtcacttgatatatagtggtgacaagcagtttttcactaatgaaaataaaacagcatttttaatgtatcgttataaagcaagttcattagtggttcttggcgatccaatcggtgatgaaaatgcctttgatgaattgttagaagcattctataattacgctgagtatttaggctatgatgttatattctatcaagttacagatcaacacatgcctttatatcataatttcggtaaccaatttttcaaattaggtgaagaagcaattattgatttaacgcaattttcaacttcaggtaaaaaacgccgtggatttagagcgactttaaacaaattcgatgaacttaatatttcattcgaaattattgaaccaccgttttcaactgaatttataaatgaacttcaacatgtcagtgatttgtggttagataatcgtcaggaaatgcatttctctgttggtcaatttaatgaaacatatttatctaaagcgccaattggtgtgatgcgtaatgaaaataatgaagtaattgcattttgtagtttaatgccaacatactttaatgatgccatttcaatcgatttaattagatggttgccagagttagatttaccgttaatggatggattatacttgcacatgttactttggagtaaagagcaaggctatacgaaattcaatatgggtatggcgacgttatcaaatgttggtcaattgcattattcatatttaagagaacgacttgcaggccgtgtctttgaacatttcaacggtctatatcgtttccaaggattacgtcgttataaatctaaatataatccaaattgggaaccacgctttttagtttatcgtaaagataattcactttgggaatcactttctaaagtaatgcgtgtaatacgtcacaaataataaaaatccaagtgctaaaaggtatacagttatgcctgaagcgcttggattttttggtttctataaagaatgatttataaaaaacggtacagataagaatatttaagtttcctatctgtaccgtattttaatattgaaatgagcttaagttaagtcgcctaacttttattatcaatccaattagtttcatcaagtataaatgttattgcttatttttgtattcttggcgtattttttgttcttctgcatagcgctctggatttttcttataaaaatcttggtgatagtcttcggctttgtaaaattgtgacgcgggtaatatttttgttgcaattgccttatcagcattaatcgtatttttaagctgctcgatataagtctcagcgagttctttttgatgatcattagtgtagaaaatagctgtttgatattgaggaccacggtcttgatattgaccacctgtatctaatgggtcaatgactgagaaaaatatttctaataacttattgtatgagaataatgcaacatcatattgaatttcaacagtttctaaatgaccactcgtacctgattttacttgttcgtaagtaggattttcaatatgtccgcccatatatccagaagttactttttctatgccgtcaaaggtgtcaaatggtttcgtcatacaccaaaaacaacctccggcaaaataagctgtattaatattcatttttgacatcctttcattagaccttagtacgatttattaagaaatcacttgctttttgaattgtttttatataacgttaatatgtgattattatagtacacaaaaatctatttttgaagatataaggtaggtaaatatggataaagaaactaatgacaacgaatatagacgtcaaagtgaacatcgcacttcggcgcctaagcgaaaaaagaagaagaaaattaggaaattacctatcattcttctgattgttgtaattttacttatcgcattagttgtatatattgtacatagttacaatagcggtgtagaatatgccaagaaacatgcgaaagatgttaaagtacatcaatttaatggaccagtaaaaaatgatggtaaaatttctattcttgtactcggtgcagataaagcacaaggtggacaatcaagaacagattctatcatggttgttcaatatgactttatcaataaaaagatgaaaatgatgtctgtcatgcgtgatatttatgcagatattccaggatatggaaaacacaaaattaattcagcatacgctttaggtggtccagagctacttagaaaaacacttgataaaaatttaggaattaatcctgaatattatgcagtagttgattttactggatttgagaaaatgattgatgaattaatgccagaaggtgtaccaattaatgtcgaaaaagatatgtcgaaaaatattggtgtatctttgaaaaagggtaaccataggttgaatggtaaagaattacttggttatgcaagattccgtcacgaccctgaaggtgacttcggacgcgtgcgacgtcagcaacaagtgatgcaaacattgaaaaaagaaatggttaattttagaacagttgttaaattaccaaaagttgcaggtattttaagaggctatgtgaatacaaacattcctgattcagggattttccaaacaggtttgagttttggtatccgaggtgaaaaagatgttaagtcattgactgtgccaatcaagaactcatacgaagatgtcaatacaaatactgatggtagtgcattacagattaataaaaacacaaataaacaagctattaaagactttttagatgaaaattaaaaataaacaaggcgatttctatcatactcagatagaagtcgccttgttcgttttcaaagaattaattggcatgcatcttatgaagaattattgatctgactttcttacgccagccacaccataatggtttggtttcatttcttctataacaacgtgaattgcttgtctatttgcccccgttgttttttctacggcgtcagttacttcgctaactaaattttttaattgttcatccgaacgaccttctaataattttacattgacgattggcatcatccaaacctcctaatcattattaatttgagtatatcatgtaatacttaaaaattcatttgcaaaataacagaacacttgttcggtaatagttgaaatagaacaagtgttcgtatataatggaattcaagtaagggaggaataacagtgtataattatcatttattagaagatagggatgttctatgtattgaccaaaaaagtttttttgcgagtgtttcttgtattgaaaaggggctagatccattagaaacaaagttagctgttgttgcagatactaagcgtcagggttctgtagtattggctgcgacacctaaattaaaagaattaggcatcaagacaggatcgagattgtttgaaataccacatagaaatgatatttacattatcaatccaagtatgcgtaaatatcttaatgtttcagttgctatttctaagattgcattgcgttatattccacctgaagatttacaccaatatagtattgacgaattttttatggatgttactgatagctatcatagatttagttctacagtacatgcattttgcgaaagacttaaacgtgaaatttatgaagaaacaggcatttattgtactgtgggcattggttctaatatgttattaagtaaaattgctatggatgttgaagcgaagcatagtcaaaatggtatagctgaatggcgatatcaagatgtaccaacgaaattatggccaattcagcccttgagagattttgggggtattaatcgtcgaacagaagccaaattgaataaaagagggatttttactataggagatttagcaaaatatccatataaatttttaaaaaaagagttcggtattttaggtgttgatatgcatctacatgcgaatgggatagatcagagtaaagtacgtgaaaagcataagattagcaatccatcgatatgcaaaagtcaaatattaatgagagattatcattttgacgaagcaaaagtagtaatgcaagagttaattgaagatgttgctagcagagttcgagcaagaaaaaaagtggcaagaacgatacattttgcctttggctatagtgatgaaggcggtgtacataagcaatatactttgaaagatccaacaaacttagaaaaagatatttataaagtagtaatgcatttcgcagatgaattatgtaataaacaagcactatatcgtacgctaagtatatctttgagtcaatttattaatgaggatgagcgacagttaagtctgtttgaagatgaataccaacgcaaacgtgacgaatgtctagctaaaacgatagaccaattacatttgaaatacggcaaaggtattgtgtccaaagcagtatcgtttacagaagcaggtacaaaacacggcagattaggtttaatggctggacataaaatgtaatgactatacggtttaagtaatatataactgtgattcgtataaaataagtctctaaagataaatatttcatatatcacaatagattttcacaataatatctaagaatacatggaatttatcaaaagagacttaataattattggatataacaatcaaaatcactcaatgcttgcataccgcgttctcggtcagtaggatttttgaaactaatttttaaagcaccgtatatatcttcgcgtacttctaagattcttaagttgcttatagatatattatgtaaactcaagatataagtcactttgcttatcatacctgattcatccggaatatctacatatagatcatacgcagtatttagtccacctagttgtttagcgggcagtgcgtcacgatacgatttagcttcggcaaaaaatgataacaatttttcagaatcattgctttcaattagtctttctaaatcttgaaactgactttttagctgtcgaatcatttctaaaatatacgttttattactcaaggtgatatctttccacatttgtgcattactactagctatacgagtgatatcacgaaaaccaccagctgcaagtttattgactaaatgatgttcttgaccgttcttttgactaacatgaactaaactagatgcaacgatatgaggtaaatgacttacgacgcttgttacg

SEQ ID NO: 7 - DNA, 2832478 bp, Staphylococcus aureus subsp. aureus ED133 (residues 1,416,240-2,832,478 of 2,832,478)
tagtcgtgttcttcagcagtagttacaataaatttagcaagagtaggtgataacagttcttttaacgtgtttgctgcttgctcatttcttggctcattgtagactaaaatataataagcgttttcaaataagtgctttttagcatttagtacaccggatttatgactaccagccattggatgaccactgactaaatgaatattatgctttaataaactgcattcgtgttgctgtatcattgctttagtactaccagtatcagaaacaataacaccaggtttagttggcatatctataagctcgctaagatatttatttgtgatagcaacaggtgttgcataaataattacatcggcttttttaatagcttcactataatttaaacatttttcattaataataccgattgatttagctttatctaactgagaagtatctgcatcgtatgcaataatattagtattagggttatggtattttatattgctagcaagacttccaccaattaacccaagcccaacaaataaaactgttgtcatataaatcaccttatttcgaaattttcagaataataacattgtaaatgagctgttgacacagtgcaatagtaaataaaaatcgataatagcattaatagataaacggatataaatcatctacaataaagagtatagtaacacaatggcaacggaggggtaaatcaatggaaccaatattagaaatgattaaaacattaacaggtattaatagtccttcaggagacacagaagaagcaattcaatttgtcgaaaaatatgcaaaagacttaggttatcaaacaacactaacaaataaaggtgcgttattaataacagtgccaggcaaaaatgatgaagtacaacgctgtattactgctcatgttgatactttaggtgcaatggttaaagaaattaaagaagatgggcgcttagcaatagaattaattggaggattcacgtataacgcgattgagggtgaatattgccaaattaaaactgatgctggccaaatatatacaggaaccatttgtctgcatgaaacaagtgttcatgtatatagaaataatcatgaaatacctagagaccaaaagcatatggaaataagaattgatgaagtaactacatcagaagaagatacaaagagtttaggtatttcagtaggtgattttgttagctttgatccacgtacagttatcacgtcatcaggttttattaaatctcgtcatttagatgataaagctagcgtagcgatgatactacaattactaaagaaattaaaagaagagcaaataatattaccacatacaacgcaattttatatttctaataacgaagaaataggttacggtgcaaatgcatcaattgattcgaaaatcaaagaatatattgcattagatatgggcgcgttgggagacggtcaagcatcggatgaatatacagtttctatttgtgccaaagatgcttcaggtccatatcataagcaactgaaatcacacctagttaatctttgcaaaataaataatattccatataaagtagacatatatccatattatggttcagatgcttcagcagctttacatgctggtgcggatatcagacatggtttatttggggctggcattgaatcatctcatgcaatggaacgaacacatattgattctattaaagcgacagagaaattattatatgcatattgcttatcaccaattgagtaaacaattagtgttgacaaatgtgaacgacctatgtaatataatgaactataaaaataattagaattttctaaagaaatagtagcagatatgaaacgtagcaaatagaaagctaatgggtgatgggaattagcacgccatatcttgtgaattggactttggaaaacaattgaatgagttttgaaagtgaacatgaattatgttaactaaggtggcaccacggtaacgcgtccttacaggtatatgcgttatgtggtgtctttttatttagacaaaatgtagtagttaattaaaggtagcaacagaaagttagtgggtgatgtgaactaacaccgagattaatgaaattgggttttgtctgcaacagaaaaattatatatagtagagagtgaactatgaatatttcgaatattcggttaatttaggtggtaccacgcgtcagcgtcctttatattgataaggatgctgacgtttttttagaaaggagcgcaaagaatggatgtattctataaaaaaataaaagcaaatgtaacacctgaagttttagcacaacttcattccaagaagatcattttggaaagtacaaatcaacaacaaactaagggtcgctattctatagtgatatttgatatctacggtactttaactttagataacgatgtattatcagtaagcactttaaaagagtcgtatcaaatcactgaaagaccgtatcattatttaacgactaaaataaatgaagactatcataatattcaagataatcaacttaagccattaccgtttatatctggatatgttgggacgtgtagctttgatttagtaagacatgaatttcctaaattgcaatcaatacaattagaagatcacaagcagcacgatgtacggttatatatggttgaacaagtttatgtatttgaccattacaaagatgagttatatatcatcgcgacaaatcaattttcaaattcaacaaaatcagatcttgagaatcgagttaataagtcaatcgaagacttaactaaaatccaaccattcatgcctacacaagattttgattttaaaactaaagaaattcaatcaaacatttctgaagaaagatttatcgaaatgatacagtatttcaaagagaaaatagcagaaggggatatgttccaagttgtgccatcaagaatttacaaatatgcgcatcatgctaatcagcatttaaatcaactttcgtttcaactgtatcaaaatttaaaacgacaaaacccaagtccatatatgtattatcttaatatcgataaaccctatattgtcggtagttctcccgaaagtttcgtaagtgtcaaagatcaaattgtaacaactaatcctattgcaggtacgattcaacgtggtgagacgacacaaatagataatgagaatatgaaacaactacttaacgatcctaaagaatgtagtgaacatcgtatgcttgttgatttaggacgtaatgatattcatagagtaagtaaaatcggcacctcaaaaattactaaattaatggttattgaaaaatatgaacatgttatgcatatcgtaagtgaagtcacaggtgaaataaatcaaaatttatcgccaatgacagttattgcgaatttattaccaacaggtaccgtttcaggtgcaccaaaattacgtgcaatcgaaagaatttacgaacaatatccacataaacgtggcgtttatagtggtggtgttggatacataaattgtaatcataacttagattttgcattagcaattcgaacgatgatgatagatgagcagtatatcaacgtagaagctggttgtggcgttgtatatgattctattcctgaaaaagaactgaatgaaacgaaattgaaagctaaaagcttattggaggtgagcccatgattttagttgtagataattatgattcctttacgtataacctagtggatattgttgctcaacatactgacgtcattgttcaataccctgatgatgataatgtgctgaatcaatcggtggacgctgttattatatctcctggtcctgggcatccattagacgaccaaaagttaatgaaaattatctcatcctatcaagataaacccattttaggtatttgcctaggtgctcaagcactgacttgttattacggtggagaagtcattaaaggcgacaaggttatgcacggcaaagttgatactataagtatcacttcaaatactcacaaagtgttatatcaagatgtaccagaacagttttcaattatgagatatcattcattaataagtaaccccgataattttccagaagcgttgaaaattactggacgtactgatgactgtatacaatcattcgagcataaagaaagaccgcattatggtattcagtaccatcctgaatcatttgctacagactatggtgtcaaaataattacaaattttattaatctagtgaagaaaggatgaaaaccatgacattactaacaagaataaaaactgaaactatattacttgaaagcgacattaaagagctaatcgacatacttatttctccaagtatcggaaccgatataaaatatgaattattgagttcgtattcggaacgagaaattcaacaacaagaattgacatatattgtacgtagtttaattaatacaatgtacccacatcaaccatgttatgaaggggctatgtgtgtgtgtggcacaggtggtgacaagtcaaatagtttcaacatttcaacaactgtagcttttgtcgtagcaagtgctggtgttaaagtaattaaacatggtaataaaagcattacctcaaattcaggtagtacggatttgttaaatcaaatgaagatacaaacaacaactgttgatgatacacctaaccaattaaatgaaaaagaccttgtattcattggtgcaactgaatcatatccaatcatgaagtatatgcaaccagttagaaaaatgattggaaagcctacaatattaaaccttgtgggtccattaattaatccatatcacttaacgtatcaaatggtaggcgtctttgatcctacaaagttaaagttagttgctaaaacgattaaagatttaggtagacgacgtgcaatcgtattacatggcgcaaatggtatggatgaagcaacgttgtctggtgataatttgatatatgaattgactgaagatggagaaatcaaaaattacacattaaatgcgactgattatggtttgaaatatgcaccgaatagtgattttaaaggtggttcacctgaagaaaacttagcaatcacactgaatattttaaatggtaatgatcgctcaagtcgacgtgatgtggttgtcttaaatgcaggtttaagcctttatgttgcagagaaagtggataccatcgcagaaggcatagaactcgcaagtactttgatagataatggtgaagctttgaaaaaataccatcaaatgagaggtgaataatatgacgattttagcagaaattgttgaatataaacagtcacttttacaaaatggctattatcaagacaaacttaataccttaaaaagtgtgaagattcagaataaaaaatcttttgtaaacgcaattgagaaagaaccaaagctagcaattattgcagaaattaaatcgaagagtcctacagttaatgacttacctgaacgagatttatcgcaacaaatctcagattatgaaaagtacggtgcaaatgccgtgtccattttaactgatgaaaagtactttggagggagctttgaaagattacaagcattgacaacaaaaacaacattacccgtattatgcaaagattttattatagatccgcttcaaattgatgttgctaaacaagctggtgcatctatgattttattgatcgttaacatcttatcggataaacaattgaaagatttatataactacgctatatcgcaaaatttagaagtgttagttgaagtacatgatcgccatgaattagaacgtgcctataaggttaatgctaaattgattggtgtaaataacagggacttaaaacgatttgtcacaaatgtggaacatacaaatactattttagaaaataaaaaaccaaatcattattatatttctgaaagtggtattcacgatgcatctgatgtaagaaaaatcttgcatagtggtatcgatggcttactaataggtgaggcgcttatgcgttgtgacaatctatctgaatttttaccacaactaaaaatgcaaaaggtgaagtcatgatgaaattgaaattttgtggctttacatcaattaaggatgttacagcggccagtcaattacctattgatgcgataggtttcattcattatgaaaaaagcaaaaggcatcaaacaattacccaaataaaaaagttagcgtctgctgttccagaacatattgacaaagtatgtgtcgtggtaaatccggatttaacaactattgaacacgtattaagcaatacgccaattaacacaatacagttacacggcacagaatctattgattttatacaggaaattaaaaagaagtattcaagcattaagattactaaagctttagctgcagatgaaaacataatccaaaacataaataaatataaagggttcgtagatttatttattatcgacacaccctcagtgtcgtatggtggtaccggtcaaacatatgattggactattttgaagcacataaaagacataccttatttgatagcaggaggcattaactctgaaaatattcaaacagttaatcaacttaaattatcacatcaaggttatgatcttgcatcaggtatagaagtaaatgggcgaaaagatatagaaaaaatgacagcaattgtaaatattgtgaaaggagatagagaaaatgaataaacaaatacaaacagaagcagatgaattaggtttctttggtgaatacggagggcaatatgttccagaaacattaatgccagcaattattgagttgaaaaaagcttataaagaggcaaaagcagacccagagtttcaaagagaactggaatactatttatcagagtatgtaggacgcgcgacgccacttacatatgctgcatcatatactgaaagcttaggtggcgctaaaatatatttaaaacgagaggatctaaatcatacaggcgcacataaaattaataatgcgttaggtcaagcgttgcttgctaaaagaatgggcaagaagaagcttgttgctgaaactggtgcgggtcaacatggtgtagctagtgctacggttgctgcattatttgatatggaacttgttgtctttatgggaagtgaagatattaaaagacaacaacttaatgtatttagaatggaattacttggtgcaaaggttgtggcagttgaagatggtcaagggactttatcggatgcagttaataaagcattgcaatattgggtaagtcatgtagaagacacacattatttattaggttctgtattaggtccagacccattcccaacgattgttagagattttcagagtgtgattggtaaagaaataaaatcacagatattgaagaaagaaggtcgacttccggatgcaattgtagcatgtatcggtggtggctcaaatgcaatcggtacattttatccatttattaaagatgatgttgcgttatacggtgttgaagccgcaggtcaaggcgaggatactgataaacatgcacttgcaattggcaaaggatcacctggcgtattacatggtactaaaatgtatttaattcaagatgaaggtgggcaagtgcaattagcacattctatttcagcaggacttgattatcctggtattgggccagaacattcttattaccacgacattggtagagtaacttttgaaaatgcaagtgatacacaagcaatgaatgctttaatcaactttacaaaacatgaaggtattatacctgcaattgaaagtgcacatgcactgagttatgttgaaagactagcgcctacgatgtcgaaagaagatattattgtagtaactatttctggacgtggcgataaagatatggaaacaattagacaatatatggcagagcgaggtcttgcaaatgactaaattatttataccttatattatgggcaataaagatttgattgaaaatgcaacattgtttagtgaaaatggtgcagatataattgaaattggtgtacctttctctgatccggttgctgatggtccagttatcatggaagcaggtcaacaagcgattaaacaaggcataacgatagattatattttcgagcaattagaaaaacacggtaatcaaattaagtgtcagtatgtattaatgacgtattataatattatttgtcattatggagaacaagcgttttttgaaaaatgtcgagataccggtgtttacggcttaattattcctgatttaccatttgaattatcgcagcgtttaaaacaacaatttagtcactatggcgtcaaaattatatcgttagttgcgatgactactgatgacaaacgtataaaagaaatcgtatcccatgcggaagggtttatttatactgtgacgatgaatgcgacaacaggacaaaacggtgcgtttcacccagaattaaaacgaaaaattgagtcaattaaagcgatagccaatgtgccagttgtcgcaggatttggtataagaactccacaacatgttgcagatataaaagaggttgcagatggtatcgttattggtagtgaaatagtaaaacgatttaaatctaacacgcgtgaagaaatcattaaatatttacaatctatccagcaaacattgaataattaagtttacttgatttaaaaaaattagtcgaatactgtttgaaaaagtgaaaaacggtgaattataaaattgaatagaaatgatacaaaagtaatatgagcaaacccaaacgttcatattactttttttgaaattgtatgcaaaaatctaaatattactataaaagtatatgcaattaaagcgtttatgttttagttttaacattaactattgtatacttatttagattagatttattatttttgataattgcagaggggaaatagaaaaactgcaaatacggaaatgaaattaattaacgagagacaaataggagtaatgataatgaagtttacaaatttaacagctaaagagtttggtgcctttacagatagcatgccatacagtcatttcacgcaaactgttggccactatgagttaaagcttgctgaaggttatgaaacacatttagtgggaataaaaaacaataataacgaggtcattgcagcttgcttacttactgctgtacctgttatgaaagtgttcaagtatttttattcaaatcgcggtccagtgatcgattatgaaaatcaagaactcgtacactttttctttaatgaattatcaaaatatgttaaaaaacatcgttgtctatacctacatatcgatccatatttaccatatcaatacttgaatcatgatggcgagattacaggtaatgctggtaatgattggttctttgataaaatgagtaacttaggatttgaacatactggattccataaaggatttgatccggtgctacaaattcgttatcactcagtgttagatttaaaagataaaacagcagatgacatcattaaaaatatggatggacttagaaaaagaaacacgaaaaaagttaaaaagaatggtgttaaagtaagatatttatctgaagaagaactaccaatttttagatcatttatggaagatacgtcagaatcaaaagcttttgctgatcgtgatgacaagttttattacaatcgcttaaaatattacaaagaccgtgtgttagtgcctttagcgtatatcaattttgatgaatatattaaagaactaaatgaagagcgtgatattttaaataaagatttaaataaagcattaaaggatattgaaaaacgtcctgaaaataaaaaagcgcataacaagcgagataacttacaacaacaacttgatgcaaatgagcaaaagattgaagaaggtaaacgtctacaagaagaacatggtaatgaattacctatctctgctggtttcttctttatcaatccatttgaagttgtttattatgctggtggtacatcaaatgctttccgtcattttgccggaagttatgcagtgcaatgggaaatgattaattatgcattaaatcatggcattgatcgttataatttctatggtgttagtggtaaatttacagaagatgctgaagatgctggtgtagttaaattcaaaaaaggttacaatgctgaaattattgaatatgttggtgactttattaaaccaattaataaacctgtttacgcagcatataccgcacttaaaaaagttaaagacagaattttttaggaagggaattatcaaaacatgaaatttacagagttaactgttaccgaatttgacaactttgtacaaaatccatcattggaaagtcattatttccaagtaaaagaaaatatagttacccgtgagaatgatggctttgaagtagttttattaggtattaaagacgacaataacaaagtaattgcagcaagccttttctctaaaattcctactatgggaagttatgtttactattcgaatcgtggtccagtaatggatttttcagatttaggtttagttgattattatttaaaagagttagataaatatttacagcaacatcaatgtttatatgttaaattagatccgtattggttatatcatctatatgataaagatatcgtgccatttgaaggtcgcgagaaaaatgatgccttagtaaacttgtttaaatcgcatggttacgagcatcatggctttacaactgagtatgatacatcgagccaagtacgatggatgggcgtattaaaccttgaaggtaaaacacctgaaacattgaaaaaaacatttgatagtcaacgtaaacgtaatattaataaagcgataaactatggtgttaaagttagattccttgaacgtgatgagttcaatcttttcctagatttatatcgtgaaactgaagagcgtgctggatttgtatcaaaaacagatgattatttttataactttattgacacatatggagataaagtattagtaccattagcatatattgaccttgatgaatatgtgttaaagttgcaacaggaattgaatgacaaagaaaatcgtcgtgatcaaatgatggcgaaagaaaacaaatcagataaacaaatgaagaaaattgcagaattagataagcaaattgatcatgatcagcatgaattattgaatgcaagtgaattgagcaaaacggacggcccaattctaaaccttgcttctggcgtttatttcgcaaatgcatatgaagtgaattatttctctgggggttcatcagaaaaatataatcaatttatgggaccatacatgatgcattggtttatgattaactattgcttcgataatggttatgatcgttataatttctatggtttatcaggtgattttacggaaaacagtgaagattatggcgtataccgctttaaacgtggatttaatgtacaaatcgaagaattaataggggatttctataaaccaattcataaagtgaaatattggttgttcacaacattggataaattacgtaaaaaattaaagaaatagatgtaaatgatgttagggcttatagttattgatactataggctcttttttatgctttttaataaagcctctataaatgatatattaaatgacaagtttaacaagtgactgcaataaatataaatatgcattgcacaacctatttgtaaatgattgagttgagtatacgttttaattcattcaatatgactcaaaacaagtcaatatgtattatatttttcgtgaataaatcttagcataacaatttatgtctgattatatatgtgtgtgtttgcaagtgcgtgatatcaaatgtcatatttgtctcattgtaatttataaaatgcatgagcaatgattgctgtaacaaattctatcaaagtaatcagtttttatattagaaataaaaatgatgatagatatatgatcgatacaaagatttaatatgcaccaaaacgtgatgagtattagtttaatcaaacataacatgaatataaatttagcttactgacataaacactacacaaacatatagttatataagtcaccttatggaatttcaaattctagtttacataatatatattataggaagttatatgtctataatgcaaaaggtaccctacatcataatcattatctaatatcgtcacataacttacttatgctataatcatggtattatattgtttggagtgatttgataagatttgtctttgatattgacggtacgctttgttttgacggccgattaattgaccagactattatcgatacattgttacaattacaacatgctggtcatgaacttatatttgcatcagcacgtccgattcatgatttgttgccagttttaccatcagtatttcatcagcacacattaattggcgcaaatggtgctatgatttcacagtaatcaaagatttctgttatcaaaccaattcatacagatacatatcatcatatcttaaaaataattcaaaagtatgagttagattatattattgatgatgattggaattatgctgcacaacttgacgctgagaacgctatttttgagcgtttagatccacataagctggccagttgtattgatgttgcaaatatcgacacgccaatcaagattattttattaaatatagacgcggcacaaattacaactatattagacgagttaaataaatatcatcaagaattggaaatgattcaccattcaaatgagtataacattgatataacagcgcaaaatattaataaatatactgcattacaatatatatttgatgcagatgttaaatatatagcatttggtaatgaccacaatgatattgtcatgttacaacatgctagtagtggctatattataggaccatcagaagcatacacacaagcaatattgaaacttgataaaatcaaacacatcgataataatgcacaagctatttgcaaagtcttaaaatcatataaataaaaacacccctatcaaatgataaccattatcaatcgataggggctattttaataaaattcgtcctcgaacatttcttcctcttcatctaatccaaataattctgccatttctccatgttcaattaacatgtttaaatatgcatcgcggagttcttcttcactcatatcattaatcatttctttaagagaatcaatccacatatttctgcgtaagtgatagtcttcttcaacttcgtttaacatggttatatgtttatttgctgcttctggactagctgtaaagagtaatgcaatcagatgtttacatatcactcgtcttccatcagcatgaggacaattacatttggattttctaggatgttccatatcaatataacaacgatatactttgttaccactgccttttacttcagcctcatgctgcgtttctgaaaatgattttaagttaatgacgcattcactttgataataattaaagcctctttctatagaacgaatacttgcaatatcaagtaatcccatgatgatactcctttttattattatttttagataaagaaaataaaatcgataagtgtctagattaatatacttgatttatctatattttataacaagtctagaattatcgcattcttaaataactaatatgaaaatgcttgcactaattcttttgtataagggtgtctatcaacattaaataattcctctattgtaaaatcatcgactatcatgccatccttaagaacgataattctattaactaagcgttgtaacacggataaatcatgagaaataacgataaaatgatttaagttcgtaatcgtttgcgcttttaatatatttattacattttgttcagctataacatctaaattagaagttatctcatcacatattaaaacgcgaggctgtgctaataacgaacgcatgacattaaatctttgtaattgtccaccactcacttcgcttggtaatttagtcaataattgcgcgttcaactcaaaagtagataaatgttgtattaataattgatcctgagcagtattatcagttaggcctctgtaataatataacgcttcttttaatgaggtctcaatcgaccaatcagggttaaagctagttaaagggtgttggaaaatcggtaacacagcattgtcacttaagtaaatttctcctttaacaggtttaaataagccaagaaccaatgaagcgagcgtacttttaccacagccactttcgcctaaaataccaacattttctccatcgggtatagtaatattgatatcttgtagcaccatctgctttttattataaccaaaagttacatgttttaactcaatcatagtaatccctctttaattgtgttctatatttaattagctgttcagtatacggatgcaaatgctcatacttgaaatgatcaatattgccttgttcaatgatttgaccttcttttaaaacattaatgtactgacaatatttcaatacatgacttaagttatgtgtgataataaataatgtttgaccatgttctaatacaatatgctgtaataaatccatcacttgattaccgttcaaagcatccaatgatgcaactggttcgtctgcaatgattaatttaggctccaacatgagaacgcttgctatgtatacgcgttcaagttggcccccagaaagttggaaactatatttatttaatatatctttgctttgtaaattaacccacgacaaagccttgtcaattttggacaatgcctcttctttactacttttataatgcttacgataaatcgcggttaactgtttacctaatttagtatggtcgttaaaactttctgcataattttgagaaatatagccaattgtatgaccataatatttactcaatctactaacattttccccatcaaattggtacgaatcatacgtgcaggttaaatcaaatggtaaatattcaagtaaggctttagcaatcaaactttttccagcgccgctctctccaatcaaggcattaatctgttgattataaattttcaaatcaatccctttaataagtgatttctcactagtattctttattgttaaattttgtatatcaatgagactcatcatattcacctcgttgtttcagcaatctatctcttagcgcatcaccggttaaattaaaaaataaaatagttatagcaatgactgaagcaggtgcaatcaacataattggatgagacgaaataaaatcacgaccttgttgcaacatagcgccccactctggtgttggcggttgtgcacctaacccaataaatgatagagaacttatatatagaataattttaccgaaatcaacgaccatcaaaacgataataaccggtataattttaggtgttaaatgacgtattaatattgttcttgtaggtacatgaaataattgtgccatttttatataaggcttattcatttcgctattaactatacttctagtcaaccttgtgtaattcatccattttattactgtaattgaaataactaaattccataaagatggttggaaaaagcttgctaaagcaatcatgatgataaattctggaatacttagaccaacatcaataaaccttaacactaatcgttcaatccacccctttttatatccggcaaatagacctagtgtaacacctatgacaacgatagctattaatgttaaaacagtaacaaacaatgttgaacgtgcaccgataataattcgggtaaataaatctctcccataatcatcagttcctaataaatgcaaccaactaataggttcaaaagtttgtgataaattgactttggttgcattttcactactgacaaagaattgtagtacaatcatcacaaatataaatgcgccgaatacaaaaaagataaggttattctttgaaaatattttatgcatgacggtcactactttctgatatcaatggtgtattggttttgttttttggatttcctaattgtaaacgctgcttcggatcaagtaataacgttaataaatcagcaatcgtattaataataacaacgaagaagccaataaataacacgcatccttgaataacaggataatctcgagatttaatactatccattaatagataaccaataccaggtatatcaaataaattttcaatcactacagtaccacctattagactaccaagtgaaatccctaataatgggataatcggcaaaattgttggttttagtaaatcatgaattaaaatataacgttcattcatacctcgtaatcttgatgcttgtacgatattactttgcaataacgtcaataaattagagcgcactaaacgaatgatgtatgcacacatacctaaagatagcgtgaatacaggcaatacaaactgacttagtataacgctatctatattcattaaatttgtgacaataaataataaaataataccgataaagaacgctggtaaactaattgatagagttgagatcactctaatcactttgtcagataacttatgaaatcgtttggctgatataatgccgagcggtatagatatgcataacgacactactaatgttgaaaaagatatgagtaatgttatgggtgcatagttgaataatatctgtgttaccggttcttttgattcaaaactttttcctaaattaaaatgtaataaatgattcatccaatgccaccactgtaccaataaagaatcatttaatcccaatttatctttggttgcatttatttgttccgtcgacacttgtgctacatcaagatgtaatattttatcaacaggattgcctggtgataatttcattaaaataaatgtaagtgtagaaataacaaataaaacaactatcatatgcatcagtctatacaacatagactttattatgaacataatagtccccctccttgtgtaagttactaacactttctttttacatgagaatggcgcatgtatatgcaacttacatattaagaaccaacgttcattatagtattatccgaaaagaaattgaagtatatttaattttttaacaaaatcattataaaatataatattttgaatcaagtcaaccatgtaaaatataaaaaagtcaaaacaaaaacaactatagcactgtattccatctctttcgaaataattgttactgcagtgtaacttaaaagtcgatgattttgtgcatatagttgtcgaatattattttttatctttacggcgaagttcagcgccttcatagccgtatttttcaatttgcttttctaatttacgcgcttttctttctttacgccaatttctagtaaaataccataatagaaaactaattaataaactcataatcgctaaaaatgcagcgtatcctaataatggttgatattttatatcttgaaaatttggaataaaaaatgcaagcacacctaatataacaaatgtaattactgctgatacaaaccatttatttaaaactaagcaacagaatattgttaataaaatcattattaatgttgtgatccataaataattaggcatatcgaataatgtcatattcattctccttttatttcattactttccttgtatacattttattataaatttttaaaaacttaaacaatagcagtcagtttcaagcaatattctatttactattagaataaacattgttccttgcgacatggaaatcgtaacattatcgtttaggagacaaaattatgtataatgaatgtattataccaaaggagtgattatatgtctcaaggtttacctttaagagaagatgttcctgtttcagaaacatgggatttagtagacttatttaaagatgatcaacaatattatgaaagtattgacgctctagtacaacaagcaaatcaatttcatcatacatatgcaacaacattaaattcaatcgaacaaattaatactgctttagctgaattagaaaatattttaattgccttagatcgcttaagtaattatgcagaactacgtttaagtgtagatactagtaatattgaggcacaagtattgagtgctaaattatctactacatacggtaaaattgttagccaattatcatttgtagagtcagaaatacttgaattaccagaagaaatacttcaacaattagaagaagcatgtccatatcaacactatattaaacagttaattaaacaaaagccattccaattatctgcgtcggtagaacaagtattagcaactttatcacctacgctaaacagtccttacgatttatacggcacgacaaaaatgctagatattacattcgattcatttgaacatgatggtacaacgtaccctgtcgactatgctacgtttgaaaatgattatgaagataataaagatcctgagtttagacgtaaaagtttcaaatcgtttagcgatgggattcgaaaatatcagcatactaccgcggcaacatataatatacaagtacaacaagaaaaaattgaagctgatttacgaggatttgaatcggtcatcgattatttattacatagtcaagaagtaacgcgtgatatgtttgaccgtcaaatcgatatgattatgcgtgacttggcaccagttatgcagaaatatgctaaacttttacaacgtattcacggattagataacatgcgttttgaagacttgaagatttctgtagaccctgattatgaaccagagatttcaattgaagactcaaaaaattatattttcggtgcgttaagtgttttaggtgatgactatacaaacatgttacgtgaagcatacgatcagcgatggattgattttgcacaaaataaaggtaaagatacaggcgcattttgtgcaagtccatactttacacattcatatgtgttcatttcttggactggtaaaatggctgaagcatttgtcttagcacatgaattaggtcatgcaggtcattttacattagctcaaaaacatcaaccatatcttgaatcagaagcatcaatgtactttgttgaagccccttctacaatgaatgaaatgttgatggccaattatttatttaacacaagtgataatccaagatttaagcgttgggttattggctcaattttatctagaacatattatcataatatggttacccatttattagaagctgcttatcaacgtgaagtgtatcacaaagtagatcaaggtgaatctttaaatgcgccgacattaaatgaaataatgctaaatgtttataaacaatttttcggagatgcagtagacatgactgagggtgctgaattaacatggatgcgtcaacctcattactatatgggattatattcgtatacgtattctgctggcttaacaatcggaactgtcgtttctcaaaagattaaaaatgaaggccaaccagctgttgatgcttggttagaaacattgaaaaaaggtggtagtgtatcacctgtcgaacttgcaaacattgcgggtgtagacattactacagaacagccacttaaatctacaattcaatatatttctgatttagtggatgaagttgaaaaattaacagatgaaattgagcaaacaaataactaagatgcgagacaatttatagtagaacaatataaaccaagattttcacattactaattgtgagaatcttggtttttttgagggtttatgaataatagaaatatatatatttatcgtaagagattttatagtaataactttaagttattgttcgtaatgtgtacctgttaaataaaaataaacactttcagcgatgttaataatatgatcaccaatacgttctaaatgtcttgctgctaaatgtgcttgtgcagcgacaaatggatcgttatcaataagatacgttgcgttaataatatgactatataagtcatcgatatcttcatcacgctcaattatttctcttattaatacggtatctttctttttaaatgcttgatctaagtcctttaacattaacatagctaatttacccattgtctttaaacgggttaacacataatcatctgtaatcttcgtacgcaatcgaatattggcaatactcgatgcattatctcctattctttctaaatcggaggcgatttttaatgaagaaatcatcatacgcaaatcactcgcaatgggctgttgctttgtaattaacatgataactcgctcattaatattataatttaattgattgatatgtttatcgtttttaactgtttgtcgtgcaaagcctctatcgtcaatacttaatgattttataccattttcaatactcacatagacatttgcacctaaccgacgtaattcttttattaaatcatcaagttgctcctgatatcgttgtctaattattgccattatatatcaaccaaaccttcctgaaatataatcttctgttttcttgtttgatgggttagagaaaattttatcagtgtcatcatattcattgacataaccatttaagaaaaatgcagttttatctgatacacgagctgcttgttgcatattatgtgtaaccataataattgtatacttttcttttagttcttggaccaactcttctactcttaatgttgagattgggtctaatgctgatgtcggttcatccattaaaatgacttcaggttcaattgctaaacaacgcgcaatacaaacacgctgttgttgcccaccggataaactatatgcatttgtgtgcaacctatcctttaattcatcccaaattgcagcgccacgtaatgatttctcaacgatttcatcaagaacttttttatttttaataccgtgaatctttggaccgtaagtaatattatcgtatattgattttggaaatggattaggttgttgaaagaccatgcccacatttgtacgtaattgttctttagaatatttttgatcaaatatgtcttgatcgcgatatagtattttaccagctgttttgactgtgggtactaactcaaccattcgattcaaagttttaatatatgttgatttgccacaaccagatggacctataatggcagtaatttggttttcataaatatctaaattaatattttgcaatgcatgattttcgccataccataagtctaaattttgtgttgaatatataacagaatgtgagtttgtatcatttggtgttttatgatgactttgtgagacatcaaacgtatgactttgagaaatttgtttagtttgtgcaagtgtttgcgccatatttaaaactccctttttaatagataaatgagattgattgtttaaattagaattttttactaaatttgttacgtaaaataatcgcaacgccattcattaagattaagataactagtaaaacgataatgcctgccgatgcaacattctggaattcttcttgaggcattttcgcccaagtaaatatttggataggtaatgctgaaaattgatccaatatacttctaggtgttgccaataatatagtcggtataccgataagcacaagtggtgctgtttctcccagtgctcttgaaagagacaaaatgaatccagttaaaataccaggtaacgctgctggtaagacaacacgtcttatcgtttgccatttattagcacctaagccgtaagaagcttcgcgtactgagttaggtacagctctaattgcttcctgacttgaaacaataataattggtaatatcagtaaggtcattgttagcgctgctgccaatatactgttacccattttcaaggcttcaatccctgcaccaccaacgaacaaagtgtaacctaataacccaaatacaactgatggtacaccagctaaattggaaatactgattttaacaaactgagtaaatttgttgtttttcgcatattcttctaagtatatagctgtacctattcctaggatgattgataatggaatgatacttaacattaaccaaagtgaaccgattaacgcgcctttaacgccagccatagatggtgttgaagaagaaaaattagtgaaaaactgtaaatttaaatgacttacccctttaatcaatgtttgagttaacaacgcaataagtacgactagtcctaataatgtacatgctaaaaatatgagtttgaacactttgtttttaaccgttctggatgataaatgtttttggacaagttgttgatcgacgagtgattgtctattactatctgtcgtttccatattaatactcctccctaaaacgcttagaaatccattgagaaagtaaattcatgattaaggtaaagataaatagtgtgaatcctacagcataaatactgtaataaatatttgatccaaatgttgcatcacctgtcgctatctcaacaatatatccagtcattgtttgaatcgaacttgttaaacttaatgaagctgttggcgaactacctgccgctaatgatacaatcatcgtttctccaattgctcttgaaatcgcgagaacgattgaagctacaatacctgatgttgccgcaggaagtacgactttagttgctacttctaatttagttgctccaagtccataggcaccttctcgaattttatttggtacagatgccattgcatcctcactcaaacttgtgatgagagggacaatcataataccgacaactaagccgggacttatagcattaaactctccaagacctggtatgaaagatcttaatactggtgtaacaaaggtcaatgcaaagaaaccaaacacaattgttggtattcctgctaaaatttctaatatcggtttaattatgcgtcgtgcacgatcacttgcatattcacttaaataaattgctgcaccaagcccgacaggaactgcaaatatagtcgcaataactgtgatttttaaagtccctattatcaatgcccagattccaaacttagggtctgaaccggtaggattccaagtagtagaaaatagaaattcagttattggaattctggtgaaaaaagtgatggtttctaaaagcaatgtgattaatatacctagtgttgttaaaatggaaatcgctgaaattgcggctaaaataactggtataattttgtcattatgcttcccttttttattattatttttttcaattaaatctttaacattagtagatgaagtcataatcaaacctctttctattactcccaaaataattagatttgtaaaataatgatgaaccactattttaagttgataagcttgtagactaactgaatgtcaaaatcagcgtctcgataaatcaagctttgtactctaaataatgattcaccatcaaaatcatgtttcaagacacatttgaaattgcgtcttattattttttgtcttcagactttttatcatcagatttcttgtcgtctgatttttgatttttatcaataaatgcttttaaatcatctaattgtgatttgtatgttttttctggtgctgctacatatccagcttcttcagctgctttacctttatcttctaagacgaatttgataaattctgacattactttattatctttcaatgctttttcatttacataaatgaataatggtctacttaatgcataagagttatcttgaattgtttttttcgtaggctctgttgctttaccattttcatctttgattttaacttcttttaatttatctttattttgtacgtagaagttatatccaaagtatccgattccctctttgtttttcgttacagaagaaacgatagcatttgtatcagcatttttttctgctttaatatcttctttattcattacttcattttcgaagaagtcataagtaccatgacttgagtttggtgatacagcatttatttttttatctggccatttactattaacatctttccatgttttagcttttccagaataaattgcttttaattgctgtttgtctaattcatctacaaaatcattttctttatttacagcaaccgttacaccatcttgcgcaattttgaattctttgtatttaatattcttatcttgtaatttttgcttctcttcatctttaattggtctagaagcatcagcgaagtcgatatcacctgcaatgaatttttggaaaccagcacctgtaccagcttgtcctgctgagattttagcatcagagtgatcttaagcccatttttcatttaatttctccacaattggtgctactgttgatgagccatcacctttagcttccccttttaaatcactattaccactgccaccattaccgccaccacaagcacctaataatagtgttgcacctaaagctgtagtaccaacaaattgccattttttcattgaaatatcctccctgtatgaacaacaaatagtatttgtattgattacatctttatcttaaccttgaattattaacctcatttttagaaactgtaaatgttacataaatgtttgttaagaaaatgtaaatattattttttgttaatctgaaaaatattgcttcattagtaaaagtaaaatacttcctgaaaaattatcgaaatttaaatatgaacacaaaaaatggacagatgaaattaaaaaactacttcatctgtccgatttaatattgaatataaaaaacacgcatcctacgatacgtgtaaaaatgattattcttttgagtcaattcgactccaaccttttttagttaaagtgattttacctgtttctatattaataatcttctgtttatataagtgaccgattgcacgtttgaatgaacctttactcatattgaatacttctttaatcgcttcagggcttgatttgtcccagaatggtaattcaccgtcatattcaactagtaaatcaaagatgacttgaccgtcatcgtctaaacgttcatgtgcaagtggtaaaaatgaaccatttaactcacctttatcattatgaccgataattctaacttgaacagattcacctagtctcggttcagctttacgttctgattcatgtacgaatattttgtaacctgattcacttaataagaagctaccaattcgtaatacgcggtaaggtttggcttcaatgacttcgttttttaaattatcgtcgtgtacaggtgtaaacatattttctacaacagattcactcgctaaacgtccatacatatgattctcacggtcaattcgcaatgtaactagcaaatgatcacctggttgtggccatagtgatttcacttttggtaaatcttcccatggtactaacacttcacggggtaatccaacatctatacgtgccccatcgcgatccgttttaagtactttagcaaaatcatatttatctttcgtaatatcaggcatattttgagttgcaagtaattcacctgaacggtttggataaatgaagaaactatattcttcacctacttctaattcatcatcatcgttcatttctgattggtttaactttacgttttcaccgtttggtccttttaaaaggtaagttgagccttgtaaccctactacttcaaggaattctatagaacctactatatctttgtctaatgccatgttattctccttcgattcttgtattctttattattataacatgtgtgagtcattctatcattacaacttatatgaggtcgaaactgtgacgataatatgatataattcttccgttagaatatcgaatgaaaaaaaggagaaaatgcatgttacaagtaactgatgtgagtttacgttttggagatcgtaaactatttgaagatgtaaatattaaatttacagaaggtaattgttatggattaattggtgcgaatggtgcaggtaaatcaacattcttaaaaatattatctggtgaattagattctcaaacaggacatgtttcattaggtaaaaatgaacgtctagctgttttaaaacaggaccactatgcttatgaagatgaacgcgtgcttgatgttgtaattaaaggtcacgaacgtctttatgaggttatgaaagaaaaagatgaaatctatatgaagccagatttcagtgatgaagatggtatccgtgctgctgaacttgaaggtgaatttgcagaaatgaatggttggaatgctgaggctgatgcagctaacctcttatctggtttaggtatcgatccaactttacacgataaaaaaatggctgaattagaaaacaaccaaaaaattaaagtattattagcgcaaagtttattcggtgaaccagacgtactattactggatgagcctactaacggtctggatattccagcaatcagttggttagaagatttcttaattaactttgataatactgttatcgtagtatcacatgaccgtcatttcttaaataatgtatgtactcatatcgctgatttggactttggtaaaattaaagtttatgttggtaactatgatttttggtatcaatctagtcagttagctcaaaagatggctcaagaacaaaacaagaaaaaagaagaaaaaatgaaagagttacaggactttattgctcgtttctcagctaacgcttctaaatctaaacaagcaacaagtcgtaaaaaacaacttgagaaaattgaattagatgatattcaaccatcatcaagaagatatcctttcgttaaattcacgcctgagcgtgagattggtaacgacttattaatagttcaaaatctctctaaaacaattgacggcgaaaaagtattagataatgtatcattcacaatgaatccaaatgataaagcgattttaattggagatagtgaaattgcaaaaacaacattacttaaaatattagctggcgaaatggaaccagacgaaggttcatttaaatggggtgttactacatcattaagttacttccctaaagataactcagagttctttgagggtgtaaatatgaatctcgttgattggttaagacaatatgctcctgaagatgaacaaacagaaacatttttacgtggtttcttaggtcgtatgttatttagtggtgaagaagttaagaaaaaagctagtgtgctttcaggtggagaaaaagtacgttgtatgctaagtaaaatgatgttatcaagtgcgaatgtacttttacttgacgaacctactaaccacttagacttagaaagtattacagctgtcaatgatggtcttaaatcatttaaaggttctatcatctttacttcttatgacttcgaatttatcaacacgattgcaaaccgtgttatcgatttaaataaacaaggcggcgtttcaaaagaaattccatatgaagaatacttgcaagaaatcggcgttttaaaataaatataatatgtagaatttcttttcgaaaatctctgtgttgaggcccggccaacttgcacatttttgtaagttgacttactgtcaccttctatattgggacttgttccccaactcgtattgtttgtagaaattaggaatccaatttctctatgcgtggcgccgacaagggttgaaaaaagctagctacaaagtcattttcattcagtcaactactgtcaatataacattgcagggtctagggcattgattcatgtccgagactatattcaatttaatagactttaactgggcgtgaggctgggacataaatccctaaaaaaacagcagtaagataattttcaattagaaaatatcttactgctgttctctatttatacaatactacgtattgaatggcttcactttgcccgtctggcacattactgtaaaattctataaatagaatttttgatgacggatcccttcctagggtgccgtttcagcctctttttacattgcctaagaacttaatgtcccagcctcgtgtcctttttattttattttttaacacatcagcacagtgaacaccccttctctaaattacaaatacagttatcaacgcattaaaagagtacatttatttaatgtgcatattgggtatgctataagtattttggattttatttttcaaaaagtctcattatcaccaccttttataatataagcaacgctataacttgaattttcaggttattccaaaaaatctaaattatcggtttacattcatatttgtcatatgtataatgaacacataccaatttaataatattttgatgaggcgcatcaatcatgagtaaactttagattactgtctgctaacagctaaatttgaaagggtgcgatgccgaagcgattataatagcagttataatttgttggactttttggttaagagctgagagtttgtcattatttaaaaataatggagtgcatcacttgtatatagattaagagcaagttcgcattccgaacttgttctttttttattattgtgtgcccttcctaacaattaggaggattatatggtaacaagaagtgtgttgaaatttggcggatcatccgtcagtgattttacaaaaataaaaaggatcgctgaaatgttaaaggagcgggtcaatcaagatgaacaattaattgtcgttgtaagtgctatgggtaacacaacagatcaattaatgacgaatgtatcgacattgactaaaacaccaaaacaacaagaactggcattattattgacaaccggagagcaacaaactgtatcttatttatcaatggtattaaatgatatcggtgtgaatgccaaagcaatgactggctatcaagcgggtattaaaaccattggccatcatttaaaaagtaaaattgctcaaattaatcctcaaacatttgaacaagcctttcaagaaaacgatattttagtagttgctggatttcaaggcatcaatgaacatcaggaattaacaactttaggcagaggtggttctgatacgaccgctgtggcacttgctgttagtaatcaaataccttgtgaaatttataccgacgttgatggtgtgtatgccactgacccaagacttttaccaaaagctaaacgactagacatcgtctcatatgaagaaatgatggaaatgagcgctttaggtgctggtgtacttgaaacaagaagtgttgaattagctaaaaactataatatccctttatatttaggaaaaactttatcgaacgtgaaaggaacatggattatgtcaaatgaagaaatattagagaaaaaagcagttactggtgtggctttggataaacatatgatgcatgtaacaattagttatcccctacctgacaatcagctacttacacaactatttacggaacttgaagaaggtgctgtaaatgttgatatgatttcacaaatcgtcaacttggatggactacaactatccttcacgattaaagattgtgattttcatcaaatttctatgattcttgaaacattaaagaatcaatatgaagcattagcttataaaatcaatgagcattatgtcaaaatttcattaattggctcaggcatgcgtgatatgtcaggtgtggcatcaaaagcatttttgacattaattgaaaataatatacctttctaccaaacaacaacatctgaaataagtatttcatacgtcattgatgattttaatgggccacaagcggtagaaaaactatatgacgcatttaacatttaatggtaaaatgattgttaaaatattctaaaaattggaaattattataaaatggagtgacaagttatgacaaaattagcagttgtgggtgcaacaggattagtaggtacaaaaatgttagagacattaaatcgtaaaaatattcctttcgatgaattagtattattttcatcagcacgttctgcagggcaagaagttgaatttcaaggaaaaacatatacagttcaagaattaactgaggctcgtgcaagtgaacatttcgattatgtattaatgagtgctggtggcggtacaagcgaacactttgccccactctttgaaaaagctggtgcaatcgttatagacaattcaagtcaatggcgtatggcagaagatattgatttaatcgttccggaagtcaatgaacctacatttacaagaggtatcattgccaatccaaactgctctacgattcaatctgttgtacctctaaaagtattacaagatgcctatggattaaaacgagtggcatatacaacatatcaggcggtatcaggttcagggatgaaaggtaaaaaagatttagctgagggcattaacggtaaggcacctgaagcatatccacatccaatttataataatgtattaccgcatattgatgtgtttttagaaaatggatatacaaaagaagagcaaaagatgattgatgaaactagaaagattttaaatgtaccagacttaaaagtaacagcaacatgtgcacgtgttcctgttcaagatagtcatagtgttgaaattgatgtaacgcttgaaaaagaagcgactgcagaagatattaaagcattatttgatcaagatgaccgcgttgttttagtagacaatccagagaacaatgaatatccaatggcaatcaattctactaataaagatgaagtatttgttggccgtatacgtaaagatgattcattagaaaatactttccatgtatggtgtacatcagacaatttattaaaaggtgctgcattaaatgctgtacaagtattggaacaagttatgcgtttaaaaggagcgaattaaaatgacacatttatttgagggtgttggcgttgcacttacaaccccttttacaaataacaaagttaatcttgaagctttgaaagcacacgttaattttttactagaaaataatgcccaagcaatcatcgttaatggaactactgctgagagccctactttaacaacagatgaaaaagaactcattctaaaaacagttattgatcttgtagataaacgtgttcctgtcatagcaggaactggaactaatgatactgaaaagtcaatccaagcttcaatccaagctaaagccttaggggctgatgcaattatgttaattacgccctactacaacaaaacgaatcaacgtggtttagtaaaacattttgaagcgattgcaaatgctgtgaaattaccagtcgtgctgtacaatgttccttcaagaacgaacatgacaattgaaccagaaactgtagaaatattaagtcaacatccttctattgtagctttaaaagatgctacgaatgattttgagtatttagaagaagtgaaaaagcgcattgatacaaattcatttgcattatatagtggcaatgatgacaatgttgtagaatactatgaacgtggtggtcaaggggttatctctgttattgccaatgtcattcctaaagaatttcaagcgttatacgatgctcaacaaagcggattagatattcaagatcaatttaaaccaatcggcatactgttatcagccctatcagttgatattaacccaattcctattaaagctttaacaagttatttaggatttggaaactatgaattacgtctgccattaattacactagaagatacagatactaaagtgcttcgtgaagcatataacatatttaaagcgggtgaaaatgagtgaaaatattactaattggctatggcgcaatgaatcaacgcgttgctagattagcagaagaaaaaggccatgaaattgtgggggtaatcgaacctacaccgaaagcaacaacgccatatcaacaataccaacatattgctgatgttaaagatgccgatgttgcaatagatttttcaaatccaaatctgcttttccctttattagatgaagagtttcatttgccattagttgtggcaacaactggcgagaaagaaaaactacttaataagttagatgaattgagtcaaaatatgcctgtatttttcagcgcgaacatgagttatggcgttcatgcactgactaaaattttagcagctgctgttcccctacttgatgatttcgacatcgaattgactgaggcacatcataataaaaaagtagatgcaccaagtggtacgttagaaaaattatatgacgtgattgtatctttgaaagaaaatgtaactcctgtttatgatagacatgaattaaatgaaaaacgccagccacaagatattggtattcattctattcgtggaggtacgattgtcggtgaacatgaagttctatttgccggcactgatgaaacgattcaaatcacgcatcgtgcacaatcaaaagatatttttgcgaatggtgcaatacaagcagcagaacgcttagttaataaaccaaacggcttttatacgtttgacaacctataaacatattaaaggagatcgattattttatggtacaacatttaacagctgaagaaattattcaatatataagtgatgctaaaaagtctacaccaataaaagtatatttaaatggtaattttgaaggcatcacatatccagaaagttttaaagtatttggttcagaacaatctaaagtaatcttttgtgaagcagatgattggaaacctttttacgaaacatatggtagtcaattcgaagatatagaaattgaaatggatcgtcgcaattctgccattccattaaaagacttaacaaatactaatgcacgtattgaaccaggtgcatttattagagaacaagctattattgaagatggtgctgtcgttatgatgggtgcaacaattaatattggcgcagtcgttggcgaaggtacgatgattgatatgaatgctactctcggtggtcgtgctacaactggtaaaaatgtacatgtaggggctggcgcagtattagcaggcgtgattgaaccccctagtgcttcaccagttataatcgaggatgatgtattaatcggtgcaaatgcagttattttagaaggtgtacgtgttggtaaaggtgctattgttgcagctggcgcgattgtgacacaagatgtaccagctggtgcagttgttgctggtacacctgcgaaagtgattaagcaagcttctgaagtacaagatactaaaaaagagattgtagcagcattaagaaaactgaatgactagtgacgtcaacgtataataatttcaaggttgagatacgattatgtctcaaccttattgtttatcattgaataaacttatgatcacaaatttcgaaatacgttacactatttatatagtaatttaacacaaaggattgataattatgaatgaattagaatttgttacgaaacatcgccgtcatttacatcaacatcctgaattaagtttacatgaatttgaaacaactgcttatattaaagcgtttttagatagtttaaatattaaatacgattgcccattggaaactggcgtcattgcatacttagaaggtaatggctcacatacgatagcgtatagagctgatattgatgcattacctattttagaggaaaatgatgtgccttatcgcagtcaatctgatcatgtgatgcatgcttgtggacatgatggtcatacaactgcattaatgctttttgtacaacgttgcaaagacatgcaagatgcgggtcaattaccgcaaaatgtcgttttcattttccaacctgcagaagaaactggtggcggtgcaaatcgattaataaaagccggtgcctttgataagtatccaattgaagcggtatttggtattcatgttaacccatttgctgatgaaggcattgcagtgataagagatgaagaaattacggccagtgcaacagagtatcgctttttcttaacaggcctgtcaagtcatgttgctgataaagaacaaggtcattcttgtggtgaagcattacaacatgtattaactcaaatatcacaaattcaacaatttcaccttaacggtttgaaacgaaatattgttcatattggtcattttaaagctggtgaagcgattaatactgtaccaagtaatggttatttagaaggtacaattcgtacatatgatattgatgatttaacaatcgttaaaaatcaaatgcaaaagatagcagaaagtgtcaagcttctgtttaatgtagactgtgaagttaaatttgcagaaggttatccccctacaatcaatagtccgaaattacgtactcaaatagaggacgccttaataaaagctgatttaaatgtctatgacaaaccaacgccattcttatttggggaagattttagtttttatggtcaacaactagctccagcttactttgtttttataggaacacgaaatgaagataaaggttttgtaactggtttgcacacatcacatttaaattttgatgaaaaagtgttaataaacgtggctaatttttacgaaaatttattaaataattacaaagaggtgtaatacattgacagcaacatggtctgtaaataagaaaatatttttacaaaatgcaatcacagtcaaaaacaatcagccattaatggcagttgttaaaaataatgcatatcactatgacctagaatttgctgtaactcagtttatccatgcaggtatagatacatttagcacaacatcactacgagaagcaattcaaattagacaacttgctccaaatgcaacaatctttttaatgaatgcagtttacgagtttgatttagtccgtgaacatcaaatacacatgactttgccgtcgttgacatattactataaccataaaaatgatttagctggtattcatgttcacttagaatttgaaaatttattacatcggtctggatttaaagatttaaacgaaattaaagaagtattgaaagatcaccatcaaaatcaaaatgcaaaaatgattattagtggtttatggacccattttggatatgctgatgaattcgatgtgtcagattataatattgaacgttcacaatggatggaaattgttgaagcactcttatctgaaggttatcagttcgacctaatccatgctcaaaatagtgcgagtttttatcgggaaggacaaatattactaccccaccatacacatgcccgtgtaggtattgcgttatacggttcaagaccatatagttcactgaatcaacatgaaatagttcagtcattgactgtaaaagcacatgttattcaagtgcgcgaagtacaagctggtgattattgcggttatagctttgcctttgaagtgactaaaaacaatacaaaattagctgtagttgatatcggttatggcgatggaattttaagaactcgtgctaaacatgaagcacttatcaatggtaaacgctacccgatacgtgcattaatgatgagccatatgtttgttgaagtagatggcaatgtacatgcacaagatgaagttattctttataataatgatatccgcatcgatgaatatacctttaaaggtgttggtgcaaattctgaacaattaagtgctatgaatcatgattctttaaaaaaggagtacatttcaaatgactgttaaatataatcaaaatggcgaattaacaatggatggtattagtttaaaaacgattgcgcaaagctttggtacacctaccattgtttatgatgaactgcaaattagagaacagatgcgccgttaccatcgcgcatttaaagatagtggattaaaatacaatatttcatacgcctcaaaggcatttacttgcattcaaatggtcaaacttgtagctgaggaagatttacagttagatattgtttctgaaggtgaattatacacagctttagaagcaggttttgaaccgagtcgcatccatttccatggtaacaataaaacgaaacatgaaattaggtatgctttagaaaataatatcggttattttgttatagattcattagaagaaattgaattaatagaccgctatgctaatgatacggttcaagttgtattacgagttaatccaggtgttgaagcacatacacacgaatttattcaaactggtcaagaagatagtaagtttggattatcaattcaatatggcttggctaaaaaagcaattgacaaagtgcaacaatctaaatatcttaaattaaaaggtgtacattgtcatattggttcacagattgaaggtacagaagcatttattgaaactgctaaaattgttttacgttggcttaaagagcaagatattcaagttgaattattaaaccttggaggtggctttggtattaaatatgttgaaggtgacgaaagtttccctatcgaaagtggtattaaagatattacagacgcaataaaatctgaaattaaagttctaggtatagatgcaccagaaataggtattgaaccgggacgatctattgtaggtgaagctggcgttactttatatgaagttggaaccattaaagaaattccagagattaataaatatgtttcaatcgatggcggtatgagtgatcatatcagaactgcactttatgacgcaaagtatcaagcattgcttgttaatagaaatgaaaaagcagatgacagtgtaactatagctggaaaattatgtgagtctggtgatatcattattaaagacgctaaattaccttcatcagtcaaacgtggagactatcttgctatattatcaactggtgcatatcattactctatggcatccaattacaatcaaatgcaaaagccttctgtgtttttcttaaaagatggcaaagcacgtgaagttataaagcgacaatcgttaagacaactcattattaatgatacaaaataaaaataaataaagtaatccccgaagaacagaaaattatactgtgactcggggaatttttaagattatttaattaagagtttattgcttgttggtttatgaatatggatgaatatttttcattacttcagctacagcaacactgcttgcattagattcatcttcaagcttttcaattatattattataatccttttcattacgattctgactcattttgtatgcagcctctatcttgtgtatcttgactttaaagcctacaatacctttggcctgcattttggtattttcagaaatattgtcccataatactgggtcttcacgatgcctttcatactttaccaatagtcttttcaagtcatctattgtttcttcctcacttaatatacttgattcaccatataaatgaactgcttgataattccatgtaggtacattttctttttcataccacgctgaagaaacgtaagaatgtgcaccttgatatatgattaatacattttgattatcttttaatgtattacattgaggattagttttagctagatgcccactaatataatagtcgtccccttttttatctaaaactaatggtacatgggtagctataggctttccttgatccacagttacaatcattccaaaagaattactttgaataaacttttcgatttctttaaaatcatctacttgaaaatactttggcacatgcatataatctccccctgtgaataacaatacattttaatgtattttatcattaaaaaatctaaggataaataagttagagtaatgccatagtatcactcgtttataaaataaactatgaaacaaaaataattaggctttaacttttacttttaacttgcttttttaaataatataaaatgataaggattaataacaaatacagtgtaaaaaataaaatttcatcaaatccaaaatctttacttgtaattaatacatcaatatgttctaattccatcatctctgctttaatataactgttaaatcttggtaaggccattaaatgtacattgtaaatatagtaataaaagtctataaaaagtatgttaaaaaatatgtatgtcttatctaaattagttttaaagaataatattcctgatatcgtaattggaataactagaatcatcatcattgctgctaaaatattaatatttaaaccaattgcagataatacaccgaaaactaataaattagcaactaaactaaggataagatatttcataaaatcacctcgtcgttgtacaccataattatattatataaatataattttctattgcaaacaatgttggtgatataaaaaaagagttctcaatttggttgagaaactcatcgcgttaagtatttgtaataagcatataaaaacaccttacttcttggtaaggtgttagttaaaatcaatgattcaaatctaagaattatagtttaacaacgtttgcagcttgtggaccgcggtcgccttcaactacttcaaactcaacagcttgaccttcttctaatgatttgtaaccatcttggttaattgctgaaaaatgtacgaatacgtcattttctccttcaacttcgataaagccgaatcctttttcagcgttaaaccatttaactgtaccttgtttcataatctgaaacctccaagactaaaattcattcaatatgcttattcgcatattacaaaaaatacatgcaaatttcactcaaatattctttgcaatatggaataatcatctgcttaacttgtattatagtgcagttattaccaaattgcaatacaataataaaaaatattcatttaatcaattattggtagtttataatatacttcattattttgtaaaacaatgaaactataaaatatttgtaaatcctcttcacaatcttcgcaatagttcatgtcacaattattataaaatgcataaatattatatttgcctgtgacataattatcgaactgaactttacattgattaatcaattgttgatagtgcttaaacatgtcatcaaaatcttgatattgatatttttcaacaatgttttctggccagtcactgaataaccaccatccctcataatcggctctaattttggtaactgtccacattattaaagaccccttccatacttcaaaaactctatacttatttttatacctttatcctctgaaaatcaagtttgacgacttgaaacaaacaaagtagcaactatagtaattattagtttttttaagtaaaactacgtataataacattatgaggtggtaaaaatgagacatatacatttacaagtattcggacgcgttcaaggcgtcggatttagatattttacacaacgcattgcaatgaactataacattgtcggtactgttcaaaatgtagatgactatgtagagatatatgcacaaggggatgacgcagatatagagagatttattcaaggtgtaattgaaggtgcctcaccagcatcaaatgtaacgagccatcaacttgaagagttagaactaaatcaaaaattatcggattttcgatcaatataaaatgctaaataaaggaagatgacagtgagatataatatttctcatatatttggggtgttagtgggaattcctgtagcgtttttaacaagcatatttgggatgattgcacttgatgtatcttttttaattgatatgtctattggtattgttggctttttaatgacatacctaccgatacaaaaactcacttcacgcaaatatttaaacgaaattggtttgactagaaaagactatcgctatattcgaaatcagttaaatcatacacaccaaaaacttagaggtattttaaaaacatatgtcaatataagatcaattaaagattttaggcagattaatgatatataccaaatttcacgttctatttatacgacagttagacagagacctgcatcattttataaagttgaaggctttttttattctcatattgataatgcattaaatttggttgatgcatatacacgtctagcaaaaatgcccaaaaaatcaattaatgaacagcaaaaattagaacaaacacgaattactttggatgaggtcaaacgaacattaatcgctgatttaaaacgtctcaacgaagatgattatgaacgtttagatattgaaatggaattaaataagttacatcaaaagcatcatcaagattgatgtaaaatagcaactattggagagatgattgatgactgaaaataaaagtttcaaagaaagccatccactagatgattttataagcgataaagaattatcgaatactactattcaaaaagaaaagttaacaattgaacaacaaaaacaggtagacacaatcagtaaacaaattaaccctttagacaatgaaggtttattagcgtttggttctgatttacagaaacaaatgtctcaattttcacatcaaatgttggatgaagtacaaagtaaagatgttggtcctattggagatactttgtcagatctaatgtcaaaactaaagtcagttaatccaaatgagttaaatactgataaaccatctatgttaaaaagaatttttagcagagcaaagtcgtctatcaatgaaatcttttcaagaatgcaatcagttagtgctcaagtcgatcgcataacgattcaactgcagaaacatcaaacacatttaacaagagatattgaattattagatacgctatatgataaaaacaaacaatactttgatgacttatcattgcatatcattgctgcacagcaaaaaaagttgcaattagaaaatgaaaagctaccacaattgcaacagcaagcgcagcaatccactaatcaaatggatattcaacaagttgcagatatgcagcaatttatagatagactagataaacgcatatatgacttacagctttcaagacaaatagcgttgcaaactgcgccacaaattcgtatgattcaaaatgttaatcaagcccttgccgagaagatacaaagttcaattttgacaagtattccactatggaaaaatcaaatggccattgcgcttacattaatgagacagcgtaatgcagttgctgcacagcgagctgtcactgatacaactaatgatttattaacagcaaatgctgaaatgttgaaacaaaatgcgattgaaactgcaacagaaaatgagcgtggcattgttgaccttgatacattgaaacgtacacagcgtaacattattgaaacaattgaagaaacattaattattcaacaacacggtcgcgaagaacgacaattagctgaaaaagaattacaacaaatagaacaagatttaaagtcacatttagtgaacatcaaaggaccgaataaacaatcataaattacgaattagatataacaaaaaaggaagcatcctaagattaaattggagatgcttccttttatattattcgttattcctgttgatatttaattggatcttgttttacaaatatgccgactagatagcctaatatcgttgcaataattgctactgggaaccactctaaagaatacgctcttagaggcaatgattctataaagttaattttcagccaacctaacttactcataacactgaaaatcgacaatataaatacgataataactggaatttgttgtgaaatgcgttttgtcggtatgaatttggcaattaaaattaataacacaacagttattgctactgggtatacaatgcttaataccggaattgacattgagataacagcatttaaaccttggttagcaataataaaactcattaaaatgaaaactaatacaaatgctttgtatgatactttaggtacgattctatggaaatattcagaaactgcaacaataagtccgcatgctgtagttagacatgccaacgccacaatgatgcccaataaatattttccgaatgaaccaaatcctgttgaagccattgtcgttaataaatatgtcccaatgtttcgatctttggatttcaattgatctaacgtcatatcacttactggcatatgattaccaatataacctaatgaaatatatatgaaaattaaagcaacggctgcaattaaaccagcagtcaaagtttgtttgaatatttgatttgttttagtaatacctgtaagttttactgcattaacaacaatcattgaaaaagcaattgctgcaatggcatccattgttaaatagccttgtgtaaaaccttcagcaaaacttgaaaaattagaatgatatagtgcttcattgccctttccagcactattaccgctaaagtctaagtatcccttaataatcatcgctaaaatagtaatcaataataatggtgttaataatgaaccaatacgatcgattaacttagatggatttaaacaaatatacaaaacgactatgaagtagataatcgtaaatataaataaagcgatactactattgctatgtataattggtgtaattgtcatttcaaaagatgtagatgcagttctaggtattgcgaaaagtggccctatagtcaaataaatgatgattaagaacaatattgaaaatttaggtgaaattttatttaatgcgccaatatatccttctttatcaagtgcacctacaatcacacctaataatggtaaaccaatcccagttagaacaaacgctaaaatggcgggccagaaaaattgaccactatccaatccgagattaggaggaaaaattagattgcctgcgccaaaaaacatagcgaagagcgtaaacccaatgacccatgtatttttattcatagagttactcctttttttaaaacacgaaataatttacaagtaaatattttagcacaaaaaataataaagagtctatatgaaatatgttgtacatagcagaaacaaaacacatgtgttgtttaaatcaaattatgacagaaaataaaattcttcaaatttactttttaaatagtaactgatgacttttattcacaatttcatataaactcatattttaaacttatttataaagatttaagtagtaatttttttaataatggagagagatgtccaggtaaatgcgcaacaccttcaacgaaaatagcatattgaccataaatattatgaattgtttgttcaacatcttcagttattggatcttgactcaaaaatacattaaatacttcaatgccaaatttacgtgacatttctacagcttcatacgtgtcaataataccatcttgactataattaaatgcagacggttcaccgtcagaaaatacgattaaaaatcgttgatgttgatttcgacgcagtaatcgttcacttgcaactctaatagcaacaccatcacgattatcatcttgaggttcaagcgccataatacgtgggccatctttttcaaaggttgagtaatcatagttaataatctcattaatgatatttggttgtgcatgctcgtctgaatcaaaggcatcctcactgaatgataaaatttcatgtttaatgttcaatgcttttaacgtctcgtggaataacactacacctttcttcgtttcagccattttatcatgcatacttgctgacgcatcaattaacaatgtaaacgtcgcatcaaatgatttacttaaatcttgttttttgtaaaacaatttatattgatcgtcgataaaccaattaattaaatccttttgtaatcgcccttttgttaaattaaaacgtgcatctcgttgttctcgttcaatcgttttctttataatttgaattaagtctttgatttcatattgtacgtcttgtttcgattcttgatattctaaaacatattgtggctcaatttcaggaatttgccattttatttctacatttttgttcacaccatcaagttgaaatgcctggctttgaccaacagcatcgccttcttcacgatttagcgtatcgtttgatcctttgccctttttggtcatcatatcagtcatatcgtctgtagaatcgccttcacgtgcttcatcattacccaatgtttcactattttgtccttcgtgaagctccatttctaaataagcgccaccttttgactcactatctgcagatttagagtcagctttttcactttcgttatcatcatcttctgaagtatcatcttccccatcaacttgacttgcatcagttctctttaaatcttcaaactctgaactagctaatgtattatatagtgttttaggtaagtaataatattcgtttagcatatcttcttttaaaatatcatctacttgatacataattctttgagccagatacatattatcttcagaattttgattttggaaaaaattaggtaaatataagaacatattaactaaaatatcatctaaatctgaatgtatagatggtatatcaaagaaatcttgacttaaaaatgcatgttctaaatacaaaaataataaatctgtatattgtgttttagtacgatacactttaatttgagattccgtatatgatatccgtgtatctaagcgaagatcaattaatttagcagtacttgggcgctcaattttaatagaatttaatacgcgcatatcttctaataatttaaaaagttgttgataaaatttagggtgtttaaaagttttatcttgtactacttcatttacaatttgtacatccatcatatgataaccgtaagcagctaacataacatctgtttttaaaccagccatttcgatatggcttggtcgatgtgaccaaaaccaactcgtaatcaaaatattttgaacaggattatagtaagggaatttttggattttaacttgtgtttgttcattttttaataagagtcgagctaagtcttgcaacatcattacttgcttggcatccaactgttcgtcgttaaattttatgaaacgatcactcatgttttatccctctttaaaagtttagttctacagcattatatattgcttgttgttcacgttcatcttccaatttatcaataattgtacgtttaattgcacgttcaactggcattacagttattaaatcacacaagtctaataatgcacggatactagcggcttcttcagaaatttgtccctgcttagacatagtacgtaaatcttcgttaaacttaataatttgttcgatttgtttatcatcttgtaataaactttgctctttaattacattttttaaaatgtccccgtcaatatagtcaacgtgaataacaacaaagcgattttttagtgcttcattcattggcaatgtaccaacataaccttcatttatcgctgcaataacgttaaatcctggtacagctttgattacttcaccagtgtatggattcgtaatttgacgacgataatctaagaccccatttaatacaggcaatgtttcaggtttagccatatttatttcatctatatataaaatatgcccctctttcatagctttaataactggaccatctacaaagacaatttcttgttgtccttccgcatttgttttaattgttttaaagcctaataagctttctgtatctaaatcaacagaacagttgacttgatgcatgggtgtatcaacaacttcacttaatgtttctgccaacttcgttttccctgaacctgttggacctttaagtaaaatatttttatttaaatcaaataatgccttcgcatcattgaaaactgttgaatctgaattcttataatgttttagtgccattttaaaacgttctcctttaaataaattaaaaaactaagacatggaataagttctccaaatgccttagtttactattctattctgatataaaacgcaatgcttagtatgcgaattgtttatattttaccaaatttactaattgaaaatctcatattaggcttcatttcaataattatgtgtttaaacttctttgaaatatgttttatagtaaccgccaactaatcctgaattatctattatttgataatattcttcagtttcgttgataacatcatattgtttgcctacagttaacatgtcagaaactgtaaatttctttgcatctgtattaatgacttctactttcttgattggtgtacgttctttccaagtttcatgtaacataaattttgtcctcactattgtaaaaaaattatttttgtaaagtgaatataaacgataatccactgttttcagtaattctaattgattcaatatcatcttgctcaagtgtttgatatggtatttctacttcatctaagcgcgatttcgcttgattaaagaaatctgcatctttcgtttcaaactcaacttgatcgactgcgccatattccggcattgtcatttcggtttctacaggcattaaatgtatttcgccacctagaccacccgttccgattttgaatacttggacatgataatcagcattgtcgaagggttggtattctgcaaatacttcaagtccgaatatatttgttaaaatttgacctgtaatatctacatgattcactttaagaatcactggccctaaaccttgcacttgatgtaacggattgaccgcactttcgaaagaaggcatgcctaaaccaacgccataattattctcatttgaatatattgagaaaatatgaccgttgttatcttcgagactgaaatatttattgccatttaattctttaactgttgtaaatggaatatccttactcgataatatttccgcatactcctctaaacctgagtcagttggtgtacgtaatccaatacccacaaagtgagattcttctaatcgctcacttggaacttgtataaattgaagtcttgttcctgggcttatatctgcatcgccgaaacgaattgagttttcaagaagttcttcacaatttaatcctaatatgtcaaccatgaaatgttttgtctgttctatatttgttgtacctaatgttatacttctaagtccacacattatagccacctctatctttatctttactattatattataacttattttaatcataaattatagaatatcggtcagttgattttgattatagattaatatgtgaaaaatgtatttctttaaaagaactatttcatttgaataggtaacataatattgttatggttgctattgagtgtgtcattaatgagtatctgtatatagcaattgaatatttcgttttttgtagtacataaaaacatatatatgtcgtgtccataaagtgaatgtacatcttgttcagatgattttaaattaactaaaggcgcttataaaattcataaatttcatcgcttgttattatctaaaatgatttcattagcatattgaaacacgctattctacctatatttctattgtgagtctatttcaatagaaatgatatattttttaagtagtcaaaattaaactgacattttaatacgaagcattataaaaataaagtacagcagtaagatatttcgactagaaaataatcttactgctgtttgttattgatttaatcccttttttaggaatagtaaactattttgtgttgtggattaagattctaataataagtcttctgggttttcaattaattctttaattgtttttaagaatccaactgcttctttaccgtcaataattctatgatcatagcttaatgcaatatacatcattggacgattttcgattgtatcttgatcaatcgcaattggtcttgtaataattgaatgcatgcctaagattgcagcttgattaccattgataattggcgtactcatcattgatccaaaaataccgccatttgtaatcgtaaatgaaccattaaccatatcatctaagccaagttttttctctcgtgctttaactgctaaattagcaatttctgcttcgatttctgcaaaattctttttatcacaatctcttacgaatggtactaataatccatcatctgtagaaacagctacaccaatatcataatattgtttcgtaatcatgtcgtcgccgtcgatttctgcattaacttctggatactttttcaaagctgctacagaagctttagtaaagaatgacataaatcctaatttagtaccatcatgatctttcataaattgttctttcttacgtttacgcaattccataacatttgtcatgtcaacttcgttaaaagttgttaacatagctgtattattagatacctctaataattttttagcagctgttttctttctgcgtgacattttttcacgaatcactggttttgtaggatattgattgtattttttctcttcttttgcaggtgcttgttgtgttgtttgtgttgatgccggtgcctgttgtttcttatcaatatcttctttacgaacaacatcatttgttttcggacttacttcagcaagattcacaccattttcacgagcatatcgacgcgcagaaggtgtagcattaacacgctgctgattgtcatcatttgtttgattgacttcagcattatctgccgatttatttgttgtttcttcttttttattatttgtttcttcattttgttgtggagtattgtcgttactattttctttagaagcattgccactaccttcgccgatgacagcaattgcttgtccaacttctacagtgtcgccttcactggcaagttgttcagataatacacctgcttcttcagatacaacttcgacattaactttatcagtttctaattcaagaatagcttcacctttttctacgctatcccctacgtttttcaaccattctgcaatggtaccttctgtaatagattctgctaattctggaactttaacctctggcatgacttatttccccctagttattttttaatgcattttctataattttattttgaacaagtttatgaatttctccatcgccttcagctggagcagccctttgaattctgccatgataacttaaatcatatttatctgcaactagcactttaacatatggataaacatataaccaggcaccttgatttttaggttcttcttgtacccatgacacttcttcaaggtttggcaattgtgctagtaatgcttcaatctcttcctctgggaatggatacaatctttcaatcgcaacgagtaatactgattcgtctggatttttagctaatgcttcttttaaatcaatgaacattttaccagttgccaaaataacctttgtaaccttatccgcttgatatgattctgtcaaaattggctcaaatccaccagaagtaaattcatcaattggttttgcaactgttttatttctcagtaagctttttggtgacataacaactaatggtcgcatttgttcagaatctaaactagccgcttgtgcacgcaataagtggaaataattacttgaactagataagttgacaactgtgcaattattttcagcagctaattgtaaaaatctctctaatcttgctgatgaatgttcaggcccttgaccctcatatgcatgaggtaagaataatgttaatcctgaacgttctccccattttgagcgagaactgaataagaagttgtcaaaaatcatttgtgacatatttgcaaaatcaccatattgtgcttcccaaatattgaagctttttttgttttccacattatagccgtattcaaaaccaactactgctgcttctgaaagcggagaattgtgtatatcaaatgtcgctttttgaccaggaacatgatgtaaaggtgtatatgtttcacctgtttgctcatcatgtaacacggcatgtctatgactgaatgtaccacgttcactatcttgaccagttaaacgaatcggtgtaccatcttgtaaaattgtcgcaaatgcaagttgttctgcttgtgcccaatcaactaaaccatcttctttattaaacggctcatggcgcttctcaagaactttgtttaactttttcaaaatgttaaagccatccggatatgttaacaatgcatcatttatttctttcaagtgatcaaacgtaaatgattgttcgtctgcttgtaacggtaatgcaagatctgcaggcttttccatatctggattatccattttatcagctttattaattttatcatgagcttgtcttagttccttttggacttgttctataaatgaatgcatttcatcttctgaaatgacaccttcattaacaagctttttaccaaacacatattcaacagagtcatgtttgcgaatattctgataaggaactggattagtaattgatggttcatccatttcgttatgtccgaaacgacgataacctactaaatcaataacgacgtctttatgaaactcttttctaaattccattgcaatatcaattgcttcaatagtagcttcaacgtcatcagcattgacatggaatattggcacatcataacctttggccacatctgtagaataagttgttgaacgtgcatcaattggttctgtagtaaatccaattctattgttagtaataatatgcaatgagccacccgtagaatagcctttcaagtttcctaagttcattgtttcgaagttaattccttgaccaggataagcagcatcgccgtgtataataattggcattgctttatgatgatcagtcgtcggagccccagcacgatgtgtatcatcttgtgctgctcttgtacgcccttcaactacaggtgcaacaatttccaagtgacttggattgttagccagtgcaatacgctgcattgtaccgtatgaatcagtagttttaatgccaccaaggtgatatttcacatcaccagtccatccagcagttaactgcaaactaccatcttcaggtaagaatttcattggatctgtatgcataaattctgaaatcatcatttcgtacggtttttctaagacatgcgttaaaacgtttaaacgtccacggtgagccatgcctatttgtatatttttaataccttctttcgcagcaatcgtaatagtacgttgtaacatcggtacaagtgcgtctaccccttcaattgaaaaacgctttgcaccaacgaagtttttatgaagatatttttcaaacccttcaacatacgctaattgtttaaatagtgcccttttttcgttattatttaacgttactttatatggcgtttcaattcttctttttaaccaaccacgttcggtattgttattaatatgcgtatactcaaatgcaatcggtcctttgtaacgtttttccattcttaaaattgcttcataagcattatcataaatgtcggcaaagtgatctgaaacaattcctgctgatataccttccaaagtctgttgatctaaatcaaagtcttcaatctctaatttaggtacatgtttccttttcggaggatttacaggataaatatcggctttaagatgcccgtattggcgaatattatcaattaaacgcatgacacgcttaattgtgccgtcgctattttgactacttgtactttttaaagctggtacaattgagtcatcattcttaattgtgctgaataagacttgtaaatcttctggtacagatgatggatcttgtaaaaagtcatcatatagatctaacattagacctaaattcgcaccgaagtttacaggagcctctgaaacttcttttctttcgttagtcattttacaccctccacaaaaatgttgaaacgcttacaatgtaataatatcactatttagttatttgttaaagtagatttacctatttatctgctaaaaagaagaatcaacaaaagcgttgattcttctaggtttatagatgtattttattgtaaattttgggagtacaacagaaatgataaagaaccattgtttatttgttttatagtcgttcttatacattagtcacagctaatgtgtacttaaaaattgatcctatgactttaattgacgtctcagacatgattaaaatatgattttaaacgttgttcctttgttaatttcacttttaattttaatcgatccaccgtttaattgaatgattttttgcgcaatagataatccgagtccattaccgccttgacttcttgaacgagatttatccactcgataaaagcgatcaaaaatgaaatcttgatcttcctctggaataccaattccatgatctgtaatttcaattattttttgcttattttttaaccttgtcttaactttaattttcttattcttcacatcatatttaattgcattatcaataaagattaaaaataattgttcgaattgatgaggtttcattttgatttctagatttttagatgtcagatccgtatcaaattgataatcaggatgcaattgttttaatgagtgtattcgcgagcgaatttcatcattaatatgcacggtctgcgcttcagaagaaatgtcatttacatctcctttagtcaattcaagtaattcttcgactaattttatgatacgattcatttcttcaatagaaatatttaacgattcttctaatactgccgggtctttttttccccatcgctgaatcaaatttaaatgaccttgaataatttgtaatggtgttcgtaattcatgtgacgcatcttcaacaaattgtctttgttgattaaatgattcttcaatttggctcatcatctcattaaacgtatttgctaaattatctatttcttcataatttgtatttaattgcaatttattttgaaaaccatctcgtcgaatctcaatcattttatttgataaactgacaagcggtttagttatttgagttgaaaatacataactgattgtggcagttataattgttgcaatcactccaaatgcgagcgcaatgatatacaatgattttacgatgttatcataattttctagtgaatgaattaacaagctataccctttgaaatcttgcgttgtgattggttctttaataattaaataatcaatgcctttataacgtttttttattacgcggtcaaaataccggtgttcataacctggttcaactctcactgtgttatcattcgatgtctcaaataatttattattatgctcatcataaataataatctcttgaaaattacctaaagatgcattcaagtctaatgcagatatatctttaacaggcttagaatgaaataaattattaatatcgcttgagcttcgttctgcatcatcaagctcactattatgcagtgtatctttcaagaaaaagataataattaaacaaaacaaaaatatcgtgacaaacgtaatcatcgtggtaacaataatccagttattgcgcaatttacgttttgtcatcgtatcacatacccaacgccacgaactgtttcaatcattttatcacgatcgtatggttttaacttgtttcgtaaatatcttatataaacatctacgacatttgtttctacttcactattataaccccatacatgatttaaaatttgttcccgttgcataacatgatttttattttcagctagaagatatagtaaatcatactctgtttttgttaattcaatttctgcgccatttaccgtcactttaaaagcattcttatcaattgtaataccgttgacatcgatgatatctttttgtggctgacgacgtaaaatcgcacgaattcttgctaaaagttcttcaatatcaaatggtttaactatataatcgtctgcaccgtaatcaagcccagcaactttgtcatacgtatcacttttcgctgtaattataatgataggtgtagattgttgttgtctaattttgcgacaaatttctaagccattaattgacggcaacattaaatctaatatgattaaatcatagtaatggctaagcgctttatctaaaccgtcttgtccatcatactctgtgtccacattgtaattttcatgtgtgagttccaattcaagaaatcttgctaagttttgttcatcttctactattaaaatttgcgtcatttgtacacctcatattacgactttttctaataaggtaatatattttaaattttgtatttttctatacaatagttgctttttaaattagtttgtttacgtttaaattttatcacaaatcaataaccatgttttaaaattttcaagctacaatcattaattatttattaactcaaatatttaataatcagttaatggaattctgttatttctgattgcagtacttaaatatagaatactgtaacacaaggtcttaccgcaatatcaattgttgtcgtatactgacttttcactaatgtaaaatgaatagttattatctttattttcacaaaatgaccgtagtttaaacatttgggagtgggacagaaatgataaagagccactaatgatttattatgtagtggttcttacacattagccacagctaatgtgtacttaaaaataggaatacatgagtaaaactcatgcataagaaatactaatttctatagaaaaagtatttctttatcgtcgtcccaccccaacttgcattgtctgtagaaattgggaatccaatttctctttgttggggccccgccaacttgcacattattgtaagctgattttcgtcagcttctgtgttggggccccgccccaactcgcattgcctgtagaatttcttttcgaaattctctgtgttggggcccacaccccaactcgcattgcctgtagaatttcttttcgaaattctctgtgttggggccccaccccaactcgcattgcctgtagaatttcttttcgaaattctctgtgttggggcccctgactagaattgaaaaaagcttgttacaatcgcattttctttcagtcaactactgccaatataacttcgtagatcatagaacattgatttatttcccagcctgtttgaacttgcaagtaacatttcttaatgtatgaattcaaaaggagtatgtaaacaatataatttttaagcttcatcagttttaaatattctaattctactgagaaatacaaatttttttattttctaaaatagcgtaatcatgcgttttatttactattcttaaaaaatattcaaaaaaagttttagtttctaattgacaatgattctcactaatgtataatagtagttgaaaatgattatcaataccacatagaacatccccccccccacaacgtttcgttcttgttggattggtcattttcaaatattccccttttatatgcccgtaaaagacaatatacgttataacaacgttttataaaagcagtaaacccttacgacactttaggtttactgcttttgtttttttactatttaattgattaatttatttctaagtaataacgttgataaaataatgcaaaatacgccaccaataatgccggcaataatatctgttggataatgtacacctagatatacacgtgatatggaaatcaataaaatcatagctgcacataaccctataagaataccttttgaattaccttgatttaatcgatttaatagatagataccacttccaaaatatgcagttgatcccatagcatgaccgctaggaaaactaaatcctgttatatcaattaaacgcagcaatgtaggtctttctctatcgaatatattttttaatgctggattcaaaattccagataatgccattgttaatgcaaaaaataatgcttcaattttgtggcgctttaacatgagatatgccacaagaagtaatgaaatacataacattgcccagacttcacctactttagtagccccaagcatgatagatgtcgtaataaagctctctgatgaatatataaattcataaacttcattatcaatccatttccctagtcttgattcgtggaaaaacgcgataattccaaaaaccaatgtaaaaacgatgagcaaagagatacgtttccattgactcataaagcattaccccccattaattcaatgcgtctttaatcatcttatcaaataaagcttctttcgtataactttgttcatacgatttcatattattgataattcgagttctttcctgttccattttatttagctcttgtaataaaatttgtgctgttaattgttcttcatcaatcgttttagcataacctttatcagcaaaatgatttgcattgtcaatttggtcgcctcgggattgatctaaacctaatggtactaataacattggtatacgtaatgttaagaactcatatatcgcatttgaccctgctctacttattactgtgtccgtaattgctaataaatctgttaaatcttctttaacaaattcatattgtatatatcctgattttttaacttgagcatcttttaatcctttaccagttaaatgtatcacttgatattgttgtaataatgcatctaagttttcgcgaataatgctatttaattttttacttcctaagcttccacccataacgagtaaaacttttttattttcattaaagcctgttaattgataaccattatgtgcattaccattttttaaatcttctcgaattgttgctccaataaaatcagctttctctttaggtaggtagtttagcgtttcttcaaatgttgtatatattttcttggcaaatttaagtgctatcttattcgctaatcctggtgttaagtcagattcatgaataatagttggtatatttaatgatttggctgcaataacaacaggcacagatacaaatccaccttttgaaaataatagatcaggtttttcttttttcaaaactttacgagcatcaagaatacctttcaatactttaaatacatctttggcattttctaaagaaatatatcttcttaatttaccactcgaaataggataatacttaatttctggtagttgtgattcaatcatttctctttcaataccatttttagaaccaatataaagcgcttcataaccttgtgataatgcagttggaattaagcttaaatttactgatacgtgtccaactgttccccctccggtaaatgcgattttcgtcattaatattacctctattcttttaaatttttataatatgcataaaatggttcacctttatcatatggcggatattccattaattgttcaccgaccttatgaaatccaaatttggcaaataaaccttgtgcaggtttgtttaacgcaaaggtgtccgttaaaataacttctgcaccacgtgctttaactacatcaataacataattgaataattctgtagcagctcctttatattctttcgaaccagttaatcgatgaataacaaaggcaccttctctatttactggccagtcaatgtcatcataccattctgcttggtcttggtcgacaacaataaagccataaattttgtcattttcctctaatacgtacaaataatctttagcaatatcttcttcaaaatgttctaaaagagggtactgatcgtcccattgctcgttgtcgtgttctttcattaattcttttgcttcttctactagatttaagatttgatctaaatctgacattttacctagacggatcatgtacgtcactccttatatcgttatgttaaacatgtttttcagtacatgttaatcttacacactattaacatgctttaaacctttattatgaatgaaaaatagtaattatcacactatgggataaaaataaccaataaaagtatcatataccaattaattgattgttaaaactagtgaataatactatttaaaaagtatatgctcatagtatattaaagcatgaattgttaacagcgatgatagaaattgctttatttacatcatttgtaaatgtctaatttatatcttttagagttagacgtcaataaaaataaacacgcctcctaaattgctatctttgcaaatttaggaagcgtgtcattaacataataataatacaattttagcagtgtgtatcgcttattttaaaatattaatcaatttatcgagaacatcatcatgtttattagctttttcaactaataactcagtaaatttattattcgtttctttattaaattcaccagttacctcgagtttattcgcttgttggaaagctttaatttgattttctaaagcttgatcaaattgcgttgtttcattatcaactttataacctaaatctgataaaccaattttaatagttttaatatttttatcatcgtctccaactttaaatgttttcgtattaggaatgacatttaaagattgatatttaggtgtgtcaatagttacgtctggtttaatgcctttaccgtgaatataatgaccatctggcgttaaccatttcatttcagtatattttaacaatgaaccatccttaaactctcttgtagtttgtacgacacctttgccgaatgtttttgacccataaactttagctttatgatagtcctttagcgcaccagtaaacacttcagaagcgctagctgaaccttcattcactaagatggatatatccatgtctttcgcttcttttaacgcatcattagaagtttgaattgcttcagtatctttacctttttctagtttaacaacagtttttcctttatcgataaaaatatttgccattttaacagcttcatctagtagtccacctggattatttcttaaatctaaaacaatctttttcaaaccatctttgtgagctttaagaactgcatctttcaattcacctgatgtatcattctggaatttattaatagtaataactccaacattaccttttttcttatactcaacacttttaacatgaattttttcacgtttaatcttaacgtctttttcttcactgcctcgttgaacagttaaagttacttcagtgttttctttaccacgaacatctttgacaacttcatctaatgctttacctttaattgattttccatttactttagtaatgacatctttaggacggatgccagcacgttctgctggagaacccttcatagggctagtaaccataatttgatcatttttcttttgcatttctgcaccaatacctacaaaatcacctgaaacaccttcattaaaggatttagtttgttcttttgttaaatattcagaataaggatcttttaattctttgaccatgccatcaattgcagctttactcaacttgtcagagttctgttttttataataatcactatttaagattttatacacattttcaattttatttaagtttgcttgatcagttttgtttaaaccacttattttttgatttataaaaatatatgcaacaactgtgatgacagctgttattaggattgtaccaattaaaattgatatgaattgccaacgttttaagtgaacgcgtttcgatgaattagtttgttggtcttgattgcttgttgcaatttcggcgcgttcatcattggatgaagatgtgtgttgcttatcatccattgtatcacttccttattatgtattatgtacttttaaattctgtgtagttaatcatatcaatttatgcaagatagcgcaccatatttcactataattgattaatttttagtcacaacttagtttattttaaattaaaaccaggataacaacttgcatcaccctggttctaactattattatattaaaattttagccattccgtatattcttcatataaatcatcaaatacagacattggcaatgtgaaatcaccatgtgtctcaatataatcagacagtatgttaaaatcatcatcgtgttttgggaaagcaagatcgtcaaatatctcttctgctagacgacctttatcgtcgtgtcgtccacgaactgtcatgacaaattgataaaacgaatagtttttcattagttcattgtcacatcaatcacttttgtttcacctttaatcacagcattttcatcataaatattaattgatgccgcttgatctgtgttagtaataataattggtgaaataacagatttagcgttattattaatatattcaaggttgaatcttactaatggatctccgacgttaacttcgtcaccactagaaactaacacttcaaatccttcaccgtctaattgaactgtgtctaaaccgatatgaactaataattctaatccgttatctgcttttaaaccaatcgcatgcttagttggaaagacattatcaacacgtcctgcaattggagacacaacctctccttcagttggattaataccaaaaccttcgcccatcattttttgtgcgaatacaggatctggaatatcttcaattttcacgtattctccagttaatggtgcataaattgcgatatctttctgaacttctttgccttttccgaataattttttaaacatactttccactcctacttatcaaaatgtgatattaaatcgccataacccaattcttctaatttttcatatggaataaattgaattgcagcggaattgatacagtatcttaagccgccactttctttaggtccatcattaaagacatgtcctaaatgactatttgattcttctgaacgcacttcagttctcaacataccaaaagatttgtcgactaattctataatttcatcgtcatcaagcgctttggaaaagctaggccatccacattcagaatgaaacttttcttcagatgtaaataaaggtttaccagaaatcttatctacataaattcctttagcaaaatgattccaatattcattcataaatggtggttcagtgccattttcttgtgtaacaatatattctatgtctgttagttcacttttatcttttttaagcattttgattcccccaatgtgattctataaacgcttttctacctgaaccacgttgatattggtaataatgtaccgggttctttttataataatcttgatggtagtcttcagctggatagaaatttttatatggtttaataggtgtaatcactggtttcttgaaaataccttgttcatttaattgttgctttttaaactcagcagcctttttctgatgctcatcatgatagaaaatgactggttgatagctttcgcctctatcgaaaaattgcccttgatcatcagttgggtcaaatgttttgaaatatatgtctaatatattttcaaaggaagtaacctctggatcaaacgtaatttgtactgcttcgacatgaccggtttgattcgtacatacctgttcataagttgggttgtcaacatgaccgccactataaccagatacgactgacttgatgcctggatatgatgtaaatggtttaaccatgcaccagaaacatcctcctgctaatgttgcatattcttttgtcatatgaattacctcctctatctatctaattataaatttagtctataaaggattgaaatggaagtaattaacactgaaaagattaaatttacttcttaaggactacgaggccaatcgcaccttgaccagtatgtgcagaaataactggtgtagttacatttatatcgtaattattcacatgaaaagcttcattaaaaactttcttcaatttatcaacatattcaataacgttagcatgtgcgacaccaacggatttgatttcatgatctcctataaattcagcaatttcctttttcaagtattggatactagaattttgagttctcgcattgtgcacaagctctaagcgaccatcatctagtgtaccaattggtttgattttcataagattaccaatcaaaccttttgttttactaattctgccacctttaattaattgattcaattgccctataactacaaataatttaatgttttctcttaaatgatttaactttttaactatttcagaagttgagacaccttcttttacaagctctactaggtgttgtatttgataccctaaaccaaaagaaatagattttgaatcaataacagttacattagcatctaccatttgacttgcttggtaagcagtgttaaatgtaccacttaatcctgaagaaagatgaatacttatgatttcagcgccatcttttcctagttcttcataagcagatataaattcgcctatggctggttgacttgtctttacatcttcatcattttcaatatgattaataaattcttctgatgtaatatctacttggtcaacgtatgaagctccttcaatagttaaacttaaaggaattacatgtatgttgtttgcttctaaatattctttagataaatcggatgttgagtctgtcacaataatctgttttgtcatggtcattttcccccttattttttacgaattaaatgtagaaaggtatgtggaattgtatttttttcatctagtttaccttcaactgaagaggcaacttcccagtcttcaaatgtataaggtggaaagaacgtatcaccacggaatttaccttcaataacagtaatatacatgtcgtccactttatcaatcatttcttcaaataatgtttgccctccaaatatgaaaacatggcccggtagttggtaaatatcttcaatagaatgaattacatcaacgccctctacgttgaaacttgtatctgaagtaagtacaacatttcgacgattcggtagtggtttaccaatcgattcaaatgtcttacgacccattactaaagtatgacctgttgataattttttaacatgcttcaaatcatttggtaggtgccaaggtaattgattttcaaaaccaattactcgttgcaagtcatgtgcaactagaatggataaagtcatgattatcctccttcttctatcatttcattttttattactaagttatctttaatttaacacaatttttatcataaagtgtgatagaaataatgattttgcataatttatgaaaacgtttaacacaaaaaagtacttttttgcacttgaaaatactatgatgtcattttgatgtctatatggttagctaactatgcaacgactacactgctattggagcttttattgctggatgtgattcatagccaacaatttccaaatcttcataatttatgtcgaaaatagacttatcactgttaatttttaatgttggaggattgaagctttcacgtgctaattgtgtttgaatcgcatcaatatgatttgaataaatatgtgcatctccaaaagtatgcacaaattctcctacttcaagtccacattctttggcaataaggtgtgtcaataaagcgtagcttgcgatattaaatggcacacctaaaaagatatctgcgctacgttggtataactggcaacttaacttaccatcttggacataaaactggaacatggtatgacaaggcggaagtgccattgtgtcaatttctgttggattccatgcagatacgatgtgtcgtcttgaatctggattatgcttaatttgctcaattactgttttaagttgatcaaaatgattaccatctttatcaacccaatctcgccattgtttaccataaacatttcctaaatcaccgaattgcttcgcaaatgtatcatcttcaagaatacgttgcttaaattgtttcatttgttcgttatattgttcgttaaattcaggatcactcaatgcacgatgcccgaaatctgtcatatctggacctttatactcgtctgatttgatataattttcaaaagcccattcgttccaaatattattattatattttaataagtattggatgtttgtatctcctttaatgaaccataataattcggttgctactaatttaaaagaaactttctttgtcgttaatagtggaaatcctttagataagtcaaagcgaagttgatgaccaaatttcgaaatcgtacctgtatttgtgcgatcatttcgtgtatttcctatttctaaaacttcttcacaaagactgtgatatgctgcatcaaatgaattcaacatatgcgataacacctcattttcattatttatagtatgtatatttagttcgacataatttaactttatgtagcattttgttatcactcattttaggaatgtgatattaatatcatggattccgttactttatttataaaatgctgattaagtacctaccacattgtaacgtgatatatgtttccaattgctaattgtttacccaaatctataactttaatgctaaaaaattttaaaaaagaggttaacacatgatttgaatattatgtttgatgtcctattaaaacagttgaatttctaaaaaatatagttggtaagaacggactttatataacaaatggaatacaactatattctctattttcaatgacagacaccatttttaatattataaaatgtgttaacctttatatttatttatgtgtactatttacaattttcgtcaaaggcatcctttaagtccattgcaatgtcattaatatctctgccttcgataaattctctaggcataaaataaactaaatcttgacctttgaataaagcatacgaaggactagatggtgcttgctgaatgaattctcgcattgtagcagttgcttctttatcttgcccagcaaaaactgtaactgtatttgtaggtctatgttcattttgtgttgctactgctactgcagctggtcttgctaatccagctgcacagccgcatgtagagttaataactacaaaagttgtgtcatcagcatttacttggttcatatactctaatactgcttcgctcgtttctaaacttgtaaaaccattttgagttaattcgccacgcatttgttgcgcaatttctttcatataagcatcatatgcattcatatttaattcctccaattaaattgttctgtttgccatttgtttccatactgaaccaagtgcttcatctccgttttcaatacgagatatggccatttcaatttgtaatttaacttcaaacgcactgtcattaatatgcgctttaagtgcaggaagctgctctgcattaccttcatcaaagataaacatagcagcacgccacctaacgattttctgtggatcatctaatagtagcaccatttctggtagtgcctctggataccctaaatcgcttatgcaatcccctgctgttcttcttacagcaggacttttatcacgaagccccttatataaatacggtaaaatttctttactttcaatcatacctaataatacaatcgcttgacgtctaaccggtactttttcatcagataaagctaaatcaagcagcggtatatcttcaaaagtcggctttggaaaatggtttaacattcgtaatcgagtcttccaattatcagtcgcatgatattcatccaaagagacatgtcgatagaaatgataattattagttgcgtgattttcttctaaagcatgctttaccaatacaggtaactgtgattctggataggtagctagcacttcttctaggacaccatccattacttcttcaatatttccatagcgatttcctaaatctagccatttacgcataaaaacaatattgtcatgttctgtttgcgcttgagtcatataatcaacatatgtttgtggtaattgttctcttaattcttggtcagtagaagttagcttaatttgatacggtatccccttaaaagttaatagttcagctttaatttcaccaaaatgattgtcaatttgaggttcatttacagattctaaaaccttattcccatcagaaaaaacagctttaatatcaggtaatatgacttcccaatcagcttttggtgccttatcaacagctaagaagttcatgacatgaaaaatagaagtgataccgtctatagataacaactgatttataaatcttggttgtgtttcttctacttttttataagtattagataacttgtcttctcttgtaaatgacaaaacaactttcattgtatttggacttggcgttggctctatacgtaaaatttccatatactttatcccccccgaatactagttgatgaaaaatttattcgaatacagcctctacttttggcaatactgtttcccaatttgcgtcattttctttatcaactgaaataaagtccataacatggaaaattgatttaacaccttcaacctttaagatgtcattaataaatgctggctgtgaatcatcaactttagtatacgtatctgatgtcataccttctctgctttcactaagtgtaatcttcattgtgttgtggttcggtgtttctgatattgatataatttgcatttgacttcctcctattgaagttcatttcctaattgttttatttctttccctattgaacactcattgatacaaaaatgatgcgccttcgttttcccctctaatttacgcagacgagttttgattggacattgattgcaataagtattcattaaattatctattttcgcgagtgcattttgctctgaaaaagttaaaatacgcgacacttcctttattacttcaaaatattgcaaccttgtaaataagtgttactgttttaaatttgacataaaaatattataacatttttgaccctaagatttgaatgaaaccttttacaattctatacgtaaaatgtatttatattcaaatactattgcatcgcaaacgatttttcagtaaaatgagtaagttatttattgagcggtttctaaacacccgcatgatcaaaatttaggaggacattttaatatgtataatgaaattttaggactagttacgtttattgcaacgttcgtgcttatggtacttatgtatcgcttttttggtaaacaaggtttaattgcatgggttgcaattggcacaatcattgccaacatacaagtgattaaaactgtagaaatctttggtatttcagcaactttaggtaatgtcatgtttgcttctatttatttagcaacagatatattaaacgatatttatgggcgtagagttgcaaaaagagcagtttggttaggcttctcatcaacattaattatgattattgttatgcaattgtcattacattttattcctgcaccagaagatatggcacaaaaagcattacacgcaatctttgatgttgtgccacgcattgctttaggctcaatcgtcgcatatattattggtcaacatattgatgtatttatcttttcactaattaaaaaagtatttagttctgataaaacatttttcatccgtgcatatggtagtacatttttaagctcaataattgatacagctttatttgtagctatcgcattcatcggaagtttacctggtacagttgtatttgaaatatttattacaacgtacgtactaaaattagcttcaacagttttcaatgtaccatttggatatattgctaaatcattttatcttaaaggtaagattgataagttagatcaaggctattaaagcacttactacataatagaataagtattaaggctgatatttgagaaaattttatcaagatgattttttttaggaagtatattacagtactacgtattagaaaatcatttttgactcagcgagtattttaaacacgtgttacttatttaagtgatgcgtgtttttttatggattacccaacgtattttgtattacagtaatagtaactttaactaagtattgaatagaaagtaggtttattatggcgaaaataaattttgatgccgcgacgaaaggaaatccaggcataagtacttgtgccattgtaatcaaagaagatgagcagcattatacatatacacatgagttaggtgaaatggataatcacacagcagaatgggcagcatgtatttatgcactagaacatgcacgtgaattaaatgttagtaatgcgttgttgtacactgactctaagttaattgcggatagtgttaacgctggttatgtaaaaaatgccaaattcaaaccttattttgatcaattggaaatattcgaacaagattttgatttattatttgttaaatggattccgagagaacaaaacaaagaagcgaatcaacacgcacagcaagcattgtacaaattaattaaaaagaacaaataaaaggagcaccgactgatatattttcaatcggtgctcctctttttatcgaagaaacaaattattttttattttttttagatttctttttcttctttttagctgctacctttttagaaggtttttttgatgccgacttttcccctttggattggttatctttttgatttttctttttagccaataataaaggaacgtcctcatctttagattcaatactagttgttgtttcaacattttcctctttatctttgcgtcgttttgcgattaagagtggtgaatgttcgttatctttcaacactttttcatctgtgttttcatttgtaacttccacatcttcttcatcttctttacgacggcgttttggtaagaagaacggcgtatgtttaactttatcgagtgactcgccattatttagcgaatctttttcttcaacagtaacatcttcttcatcttcttttcttcgacgtttcgcaaataaaagtggtaaatgttttgtatcgtctaaagtctcttttattgaatctttattattatctcttatttctaattcttcctcttcatcttctttacgacgacgtttggcaatgaagaaccagaaactagctagtaagccagagatacccaccacaccaatagcgtttttaataacattaccgaaattattactaaagtgacgcatatgaagtggatcaatgtcatcatcttcatcaagtttctttttatgtccaatagtcgaactgttaaatggatgatttgcagttccataaccaattgttaaatggctattagattcatttccagtacttgatgattgtttagcacgatcagatgttacaatttgtactgctgaaattcgagcaataccattgttcaatgcagcctcaacttgctgtaatgtatgcgcattattaatatctctaattgtttcaagcacaatttcgttaattcgattcattgctgcttgtttttcatcagatgagccaatttcactatttcgaatactattcattttttcatttgaaaagtctttaattctactaatagcttcttgcttgcgtttagctagttcttttgctattggattagctgctttcatttgagctttaaattgttccaattgcccagttatttcatcgatgctttgcgcacgttgaatcgcttgaattgcttgttcttttaattgatttaacttagcaattgcttcttgcttctctttatctgttagatcagtacgagctttgatttcatcaatcatatgttgaattgcatcttcaatcgatttaattgcatttgattttgcttgttcaatcgtaaattgttctggattaaattgttcaatatgcgcttgttcttgttgttgaatttcttcaactgaatgaacatcaggtgcattgttaatatgatcaattgcttgttgtttaagcttattaacttcggcaattgctgcttctttttgttctagtgttaatgtcacactattattgatttcattaatcttttgttgtgccgcattttcaattgattcaattgcctgttgtttgactactgacaattctttttctacaacttttacaggaacattaacaatcacttttgatccatcaagcaatgtaacttcaacttttgctgttaagctatcagaaatcgttgcagttgatggtgtatcgataacttctgctgtaagctgatctattaagttaatgtgtgctaaaacatcttgctctgtaatgatgtcatcacgatgtacgattagttcaccattaacaagcaattgttcaggtgttgcttcagaaatttcatttacagcaggttgatcgtcaacctcccatacatgcgtatttctaatgtcatctaaacctaagtttaatcctcgatttaattgatctatagtttgagcattctcaacgttttgtagtgctcgtttttcagcttcgtcaatttctttgagcgcttttgctttttgctcaggtgttaaatctggatttgaattgatttgatcacgcttcgcattagctaaggcttttattttatttttcgcatcttctttagctttcactaaatctttgatgtcttgtaatgcttgtgctaaacgctcttttgcttgctcaatctcttctttagtcatcgcattgttaatgccgttatgaccttgttgcaagatttgatttattcgatctttgagtgcttgtttttccttatctgttagatttggatttcgatcgatttcgtcaattaaagcttgtacacgtttatcaacatcttgcttcgtatcttctttagctttcactaaatctttgatgccttgtaatgcttgtgctaaacgctcttttgcctgttcaattccttctttagtcatcgcattgttaatgtcgttatgaccttgttgaagtatttgattaatacggtctttaagtgcttgtttttccttatctgttagatttggatttcgatcaatttcatcaattaatgcttgaacttgtttatcaacatcttgtttcgcatcttctttagctttcactaaatctttgatttcttgtaatgcttgtgcaagttgtgctattgcctgctcaatttcttctttagtcagcgcattgttaatgtcgttatgaccttgttgaagcatttgattaatacggtctttaagtgcttgtttttccttatctgttagatttggatttcgatcaatttcgtcaattaatgcttgaacttgcttatcaacatctttatttgcatcaattttagctttcggtatttcattggcatgcacttgttcaatcgcttggttgccagctgtttgaacttgagatacatcctgattacttgttgctttattaatgttattaatgatgttgtttgccagttcttctgctttatttttcgcaataagcttgtcttgatccgtcgcatttgaagcttcgatttcttttagcttattagctaaagcttgattaatcgattgaattgccttgtctttagcatcttgtagtcgttgatcaccattaagattttggattgcatcattgactgattgaattgcgccattgatatcattcacatttgtattatcactatttagcaatgtatttgctagacgtttagcatcatcgaagtttgttttagcattatcgtcagcgttttggtaattgacagtttgctctgcatttggaatttcattgtcaactaaatgtttcaatgtttccattgcattatttaagtcaatttgattattaacaatatctgttacatctgatacagtatcggcattgttaattgcattatgtgcaagatcttgttgctgtttatttaatccatttaacgaattaacaaacgcatttgctttatctttggcatttgcaaggttttggtctccatttaatgcattttgagcatcgataatattttgtttcaattgctctgcttcagcttttgcaattgcattaccttgcactttatctaactcatgtgctgcattcgcaattgcattatcataatttgctttcaaattatcatctgcattgatgtaatttgtgctgctgataacaccaaggtgctgttcgtcaatatattgttgtactgcacccattgcattatctaatttagttgctctattaattgctcgagatgctttatttagcgtttcagcattattaatttgttgggttgccaattgtctttgagcattgtttagatgtgttaattgatccaatctttgtaatgcttcagacttacgattattaagtctttcttcaccatttaatgcttgcttagctgcagtgactgcatcatttaatttgataacttgttctgcagttaagttttgacctgtcgatttatcaagtgcttgtttcgctttatcaaccgcttcatcatacacttgtttaacttgtgtatctgcattgacatagttcgtgctacctttcgtgcgtccttcattgccagtgatttcttgtgacaattgatccattgcacgattaagtgccttagcctcatctacaatttgttggatttgatttaaatcgtttgattgatcgatgcgacctttaaatccatcttgttgagcattgtttaatgcattcaattggtcgatgtcatgtttaccatttgttttagcaagtgctacacgttcatctccatttaatgcttgttttacatttaaaatgttttgaagtgcttgatccacttgttgcttattcgaattttgttttaatacattttcagcttctgcaatagcttgtttataagcattttgcttatctgaatctgcttgcgtgtaatctacagtttgctcaacgttagcatgttcattaactgcttgctgtaattgatccatagattgattcaattgcgttgcttgatctactaattcagcaattggttgaagtttcgtcgcttgatcaatattttgtttagcagttgcaatttgttcagcatttaaatgtgttaattggtcaatagtttgtttcgcttgtgttttagcttcagcgactctctcattaccatttaactcatttactttttcttgaagcttagttaatgcttgttctacagcgtctttattcgcatttgaaccattagttggatctgtaatgctttctgcagcttgtaacgcttgatctactgcttcttttttatcagttgacgcttcagtgtaatttggttgagccttatctgtattcacttgatcaactttatttttcaatgtttccatcgcgtgatcaagttcagtagcagtttgaacatgttgtgcaacctctgttcttgtaggcgctgcatttatagcatcagttaaagcttgttgttgcgcatgatttaagtttggtaatgcattaacagtcgttactgcttgttgttgatcacgagcaagtttttgatcaccatgtaggttatcttttgcagttgttactgcttgtgttaattgttccacttgtgatttgtcgagtgttggattacctgtttggttaattaaatctttggcatgttgtactgctgcttggtatgcatctttttgtggcttatcttcattgataaacttgctaccagattctgtttgttgttgatcttgaatactattacgtaatgcttgcattgcttgatcaagcgcttgtgcttcagctaatttttgcgctacttcatcacgagttgctgcgttgtttatttgactttcaagagcttgacgttgcggattatttaaactatttaattgatttaaatcagtaactgcatgttgtttatcgtctgcaagtttttgatcaccatgtaggttatctttagcttggttaacaccttgtgtcaattgttcaacttgtgctttatcaagcgttggattgctagtttgattaatcaaatctttggcatgttgtactgctgcttggtatgcatctttttgtggcttatcttcattgataaacttgctacccgcttctgtttgctgttgatcttgaatgctattacgtaatgcttccattgcttggttaagtgcttgtgcctcagttaatttttgtgctacttcgccacgagttgctgcattattgatttgattttcaagtgcttgacgttgtggtgtattcaagttagacaagttatttaacgtttctgttgcacgttgcttatcttgagctaatttttgatcaccatgtaagttgtttttagcatcagtcactgcctgtgtcgcttgatcaatgattgatttagctaatgtaggatcagttgttttgttaatcaaatctttcgcgtgttgtactgcttgcgtataagcatctttttgcgcttgatcctcgttaataaatttactacttgcttcagtttgtggttgatctttaatactttcttttaatgctttcatcgcttcatttaatgcttgcgcttgtgcaatgatttcagccactttatcacgagttgttgcattattaatttgattttctaacgcttgttgttgagctggtgttaattgatctaaatgattcagagaatttccagctgtttgcttatcttgagctaatcgttcaacaccatctaaaccatttttagatgttgtcactgcttgtgtcgcacttgatacatttcctttattgatagtcggattatttaatcctgcaatgatagactcagcattttgaactgcttcatcatatgcttgttttttattcggttctgcattgacaaagttaccatttgctttagtttggtctttatctgcaataccttgtttcaattgtgtcattgcttgatttaaatcttgtgctgtttgcttaattgtgtttacatttgcaacagtttgcgcagcatcgacttgttgttttaatgcatctttttgcgcttgatttaaatcattcgcatttgtaataacttgtttcgctgcatcttttgcacgttgtacattgtcattaccattcaatgcttgtttcgcttcgttcacacgttgcatcgcttgttccacttcagtttgacttgcattgttgccatttgctttagataaaataccttctgcttgtgcaactgcattagtataagcatctttcttagcttgatctgcatcagtaaagttaatgctatttaatgtctcagttttatcttgtaatgcattacttaagttagtcattgcattattcagattttgagcattttgcttaacattattaactgttgcaatatctggtgcttgttcaacttgtgttgttaacgcttgtttttgagcatcatttaaatgatctaatgtgccaagatttgtcttagcagcttgtttggcatcagctaatttttgattaccgttaagtgcttgatttgtatcattcactttagttaatgcttgttgaattgtatttggatccattgttggatttgttgtttgttttaacaattcttctgctttagttactgcattgtcatatgctgtttgcttgtcagtatcagcatcgtgatagttctcgctacctttaatttgtgctttattcgcaataccttgtttcaattgtgtcatcgcatcattaagcgtagttgccgcttgttgaatagcattgacgttaggtacaagtgttgcttgcgtgatttgtttgctgtattcatcacgttgcgcttgattcaagtttggcaattgatcaatagcatgttgaacattttgtttcgccgatgctaagttcgtattaccatttaaatcatttttagcttgcgtaactttatttaacgctgcactaatttcgctaggtgtaacgacaacatcaggcgtaccactaattaatgcttcagctttcgctactgcttgtttatatgcattttgtttgtcaggatctgcattgacaaagttaccatcagcttttgtttgttctttatctgcaatgccttgttttaattgtgtcattgcattgtttaactcttgtgctgtttgtttaacattgtttacaccagcaacagtagtttcattttgaacttgttgttttaatgcgtctttttgtgcttggttaaggtcattagagctattaattaatgctgttgcttcgtcttttgcatgttgaacgttggcattaccatttaatgcttgttttgttgcattaacttgttggattgcttgttcaacttctgattgtgttgcattgccaccattagcttttgaaatgatattttcagcatttgtaacagcagtgttatatgcttgttgttttgcttgatctgcatcagtgaagtttactgttgctttcgtagcatctttgtcagctatcgcttgtttcaagttacccatcgctgtatttaagttttgcgcattttgtttaatttgatttgcttcttcaacagtatgcgcgccattaatttgatcagtaactgcttgtttttgcgcattatttaagttgtctaatgaacctaatgattgtgtcgcttgttgtttcgctgcctctaggttttcattaccatttaatgcatttttagttgtgcttacttgtccagcagcttgattgataacagtcggatctaaagttggacttgtagtttgatcaataataccttgtgcagttgtgacagcattattgtacgcatcctttttattcggacttgaatcagtataattttggttttgttttgttgtcgcattatctgcaatactttgacgtaatttgtccattgctgcatcaacattgtttgctttttgttcattaccttgtgcttctgcaacagtagtcgattgttgtaccaattgttttaatgcctctttttgtgcatttgttaaatggcttaaaccgtcaatcgctgtatttgcgtgttgtttagctttttcaaggttttgagtaccattaagcgctgcttttgtagtattcacttgattcatagctgcttcaacttgatctttaggcacgtttgtacctgtagatttatttaaaatattttcagcattacgaaccgcttcattgtatgcatttttcttctctggatctgcatctgcaaagttttgactgccaagtgtattgtctttatcattcaagctatttttcaagttacccatcgctgcatttagttcctgagctgtttgaatggcttgcgttacttcggctacagtgtgcgcttgattgatgtttccagtaacagcacctttttgtgcattgtttaagttatctaacgtagataatgtttggtttgcattgtttttagcatctgttacttttctatcaccattcaacgcttgtttcgtagttgttacagttgaaagtgctgcttcaacttgtgattggttcgcatttgtaccatttgcttgattaataatattttcagcagcagttaccgcattgttatatgctgtttgtttttctggatctgcatctgtaaagttaacactttgtttcacttgatctttgtcttggattccgttgattaaacgttccattgcttgatctaattgttcagctttagttttcacttgatttactgtgctaatatttggtgcatttgtcacttgcgtatttaaatcttgcttttgagcattatttaaatgacttaattggttgatgttagcagtcgtttcttgctttttattcgctaagttttgtgcaccattaagcgcagttttattagtgttcacttgatttgctgcttgtgttactgcagatggatcaagtgtcggctggctcgttgcattaatgatattttcagcacttgtaacagctgtattgtatgcattttgtttatctctatcagcatcaacatatggttgactcgcttttacttcatctttattcgcaatactatttcgaagttgattcattgcattatcaagatttgtcgcgttgtctttcacactttgaacgccagttacttgtgtcgcgctatcaatttgaccagtaatactttgtttttgtgcatcagataaatgtgtcatttgacgtaatgcatctttagcttgttgcttcgcagttgctaagtttgtatcaccgtttaaacctgtttcagcattattaacacgttgtgttgctgctgtaacatctgctgcatttgtaatcacattaggtgaaccatttacaatgtttttcgcagcattatatgcatcagtataagcaccttgcttatcaggactcgcgttagtgtaattaccaccagctacaattgtgtcatgatcagcaattgcttgttttaattgatccatcgcattattaagtgatgtagcactattttccagatcagttacacctgatacacgttgcgcagcgttcacttgttgttttaatgctgttttttgtggtgtattcaaatgtgtcaagttatcgatagcttgtgtagcttcagttttagcgcgttgtaagttcgcgtcaccgttcaaagcattttcagtagacgttacactttgaattgcttgttcaacagcttgcttatctttattcgcaccgtgatctttatttaagtaagattcagcttgtgtgatagcattatcaaatgctgttttcttagttggatctgcgtcgatgtaattttcgttcgctttagtttgatctttatttgctatagctgattgtaatcgttgcattgcaccatctaagtcttgtgctttcgttttaacaccatttacaccgttgactgttgtcgcgccttcgatttgtgatgttaaatcttgtttttgtgcattatttaagtgtgttaatgtacctaagtttgctttcgcatctgattttgcttgtcttacatttgcgtcaccgtttaaagcattcttagcagttgttacttgatttaatgcagcttcaacttgtgctttcgtcatattttgaccgtgtgctttatctaaaataccttgagcattcgtaacagcatttgtgtaagcatctttcttaccttggtcagcatctgtaaagttcacttgttgtttaacagtgttttggtcattaataccattttgaagttgacccattgctgtatttaattcattagcagtattttgtgcagcagttacgtctgctactgtagttgcattgtcaatttgactagttgctgcagttgattgcgcattattcaagttactatatgaagctaatgcacgtttcgctgcttctttcgcttgagcaactttattatcaccattcaagtcatttttagcttgattcaattggttaagcgctgcttgaacttgtgtttcattcgcgttgctgccattagcattagtaattccttctgcttgtgtaaccgcagtatcatacgcttgttgttttggttgatctgcatctgtgtaattgacgcttcgcttcgtattatccttttcagcaagtgcatgtttcaaattacccatcgctgtatttaacgatgttgctttatttttagccgctgtaaccgccgcaaggtttggtgcatgatccacttctgcatttgccgcagttcgttgtgcattgtttaagtctgataaatgaccgatgtctgatttcgcattttgttttgcatctgctaatttttcatcaccgttcaatgcagacttcgcactgttcacttggctcgctttttgattaatcgtatctggattcatttcagggttattcgttgcactaataataccctcagcattagttaccgcatcattgtatgcagtttgtaaatctgcattcgcgtcttgataatcttcacttgatttagtcgcatctttagaagcaatactttgtcttaattgattcattgcttgatctaaagtaccggcattagcttgaataccttgaacaccttcaacagtcgtaccgcgttcaatttgcgatgttaagtttgctttttgagcattagttaaatgtgacattgtcgctaattgttgtttagctgtgttcttcgcttcatttaatcgcgcgtcaccatttaatgctgttttagcattattcacacgttgtaaagcttgttcaactgctgttttattgtcatttgaaccagctgttttatctaataacgttttagctgctgttacagcatcattgtatgcagtttgtttttctctatctgcatcagtatatttctgagctgcttttgtagctgcttcatcattaataccattttgtaagttgctcattgcagtatttaattcagatgccgttgtagacacttgatttacacctgcaactgttgtcgcaccttcaatttgtgatttcaatgctgctttttgtgcattattaattgatgtaaggttattcaatgcatttttcgcagttgtcttagcgttcgcaacattttgattaccgttcaattcgtttttagcacgttgtacattttgtaacgcagtttcgacattgtcttttgcagtatttggaccttgtgctttatttaaaatttgttcagcttgcgtcactgcatttgtatatgcattacgtttcgcttcatctgcatcagtgaagttaacaccttgcttaatcgtattttgatcttgaataccatttttcaagttcgtcatagctgtatttaatgcatccgcattattttgtgcttgtgttacttcattaacatgcgttgcaccctcgatttgacgtttcgctgcatctttttgtgcattagttaagtcacttaagccattcaaatgttgcttcgcatttgtttgtgcagttcttaagttttcttgaccatttaacgcttgttgtttagctgtcacttggtctttcgcttgatcaatttcttgcgcattcatcgttggactagttgtttgaccaatgattgcttttgctgcagtgactgcattgttgtagtcagtttgtttgttttgacttgcatccgtgtagttttgacctgctttaatcgttgcttcattcgcaatgctatctcgtagacctttcattgcagtgtttaatgtttgtgcattatcacgaacagtttgaacatttggcaacgtcgtcgcttgtcccacttgttctttaagttttgctttttgcggaccatttaaagaagttaaaccatcaattgctgtgttggcattttgtttcgctacttctaaattatgattaccgtttaactgcgtcttcgcattcgttacttgtattgctgcatttgtaacatctgatggtgttaacgttggtgttggtgtaccactaacgatattttctgcagctgtcactttttcatcatatgcttggcgtttattcgcatcagcattgacatagttaccactagcttttgtgtcggctttatcagcaatggcacgttttaaagctgtcatcgcagtatttaattcagtcgcagtatgttcaacactatttgctacagatacgcgtcctgcacttgttacttgtgcttttaatgcttctttttgttttgtatttaagtccgaagcatttgtaatcgctgtgttagcagcctgtttcgcacgttctaagttttgaataccgtttaatgcagtatttgcttgtgtaacagcttgcattgctctttcaacatctgctttaggtgtattaccgccagctattttatttaaaattgttgctgctgcatttactgcttgagaataagcagttcgtttagcatcatcagcatcttgataattttgactttgtaacgtcgtgtctttatcacgaattgatgtttctaattgacccatagcaccatctaattgttgcgctttggctttaactgtattaacaccatcaacatttgttgcttgtgtaatttcattatctaacgcattacgttgtgcattattaatgtgtgtcaatgtacctaacgtttgtttcgcagcgactttcgcttcatttaattttgcatcaccgttcaacgccgtcttcgtactgttcacattttgtaatgcttgttcaactgctgctttgtctacattttgaccactagcttttgttaaaattgcttttgctgcatttacagcttgatcataagctgatttcttacttggctctgcatctaggtatttctgagtttgttttgtttgtgtctcatcattgataccattttgtaaactgtgcattgcgttatttaattctgttgcttttgcagtttcttgatttacaccagctactgttgttgcaccatcaatgctatgcgttaatgcatctttttgtgcattgttaattgatgttaagttattcaagttgtttttcgcagttgtcttagcttgagctaagttttgcgcaccatttaatgcatgttctttagttgtcgcttgtgatgttgcttgagtaatagtatttggttccatcgttgggttcgatgtttgattaatgattgcttttgctgcagaaactgcactgtcgtactcgttacgattatttggacttgcgtcagtgtagttttgccctgctttaattgttgcttcattcgcaatactatctcttaagcctttcatcgctgtattcaacgtttgagaactatttttaacagtttgaacgccatctaatgtagttgcactttgaacttgttcttttaatttcgctttttgtgcattattcaattgcgctaagccatcaattgtattattagcattttctttagcaacacgtaagttgttatcaccatttaatgctgttttagccgcattgacttgtgatgccgcactatttacgtcattgactgttaatgtcgcattcggtgtaccactgataatattttctgcgtttgtcacttttgaatcatacgcttgacgtttttcttgatcagcattgacataattaccgcttgcttttgttctttctttatcagcaatagctgctttaagtgctgtcatcgcgccgttcaattcagtagctgtacgttgaacgttatttgcatcagatacacgttgtgcattgttaacttgtgtttttaatgcatctttttgtttttggtttaagtcatgtgcgttgttaattgtgttcgtcgcatttgttttagcttgagctaagttttgtgcaccatttaacgctgcttttgttgtattgacttgatttgccatgccattaatcgcattagcatccatatttggattgttcgttgcattaataacaccattgcattatttacagcagtattgtaattatttttgttgctttcagatgcatcaagataattttgacttgttttcgtcgtattatcattttggatacttgtacgtaatgcacccatggcagaatttaacgtattacctttatctttaacaccatttacaccagctacattttgcgcttgttcaacttgatgcttcaagttgtctttttgtaattgtgttaagttaggtaaaccattaatcgtatttgttgctgaagttttcgcatttcttaagttttcagcaccatttaaagccgctttcgctcttgtaactgtatttaatgcattatcaacgtctgctttagatgtgttaccaccagtttgtttatttaaaatgccttcagctgctgtgacagcttgagtatatgcgttacgttttgattcatctgcatcaagataattttgatttcttaatgtcgcatctttatcattgattgaaccttgcaagctattcattgcgccgtctaatgtattggcatttgtttttacagtattaaccccatctacagtcgtcgcttgattgatttgacgttctaagtcattacgttgtgcattcgtaatatggtttaaagcacctaaattttgtttagctgtcgctttcgcttctgctagtttcgcatcaccattcaatgcatctttcgtacttgttacttgttgtaatgcacggtcaactgctgctttatctgaatttgatccagattgtttatttaaaattgctttcgcagcagctacagcttgatcataagcagttttcttactttgttcagcgtcacgatatttttgagtttgttttgttgcattttcatcatcaataccatgttgtaattgacccattgctgtattaagttcatttgcagtttgttggatacttgttacatttgcaacacgttgcgcacttgtaacttgtgcttttaacgcatctttttgcgctttatttaagttagcagcaccatcaatcgcatttgttgctgtttgtttcgcttgcgttaaattatgtgtaccatctaatgcatttttcgttgatgttacttgtgtagcgatttggttaattgcattagcatccatatttggattgcttgttgcattaatgacaccattagcactatcaacagcattgttatagtttgttttgttacgttctgtagcatcaagatagttttggccatttttcgtagctgtgttatcttgaatgctatttcttaacgtacccatagcaccatttaatgtgttggcacttgatttaacagtatctacacctgcaacattttgtgcttgttgcacttgttgtttcaatttatctttttgagcagttgttaaatgttgaagtccgtttatagtagtgtttgcatttgatttagcttgttctaaattatggttaccatttagggcacctttcgcatttgtcacttgtgacaacgcgttttcaacggcagctttgtctaaatttgatccactatttttatttaaaatattttctgcgttcgtaacggcttgagtataagcagttttcttatctgaatcagcatcaagatagttttcgctcgctaaagtattcgttttatcattaataccattttgcaagttagccatcgctgtattcaattgtgtacctgtattagataccgcttcaacaccagctactgttgttgcttgatcaattttagttgttaagtcacgtttttgtgcattattaatagacgttaaattatttaatgcatttttagctgtattcttcgcatttgtgacattttgatcaccattcaatgcatttttagcgctagtaacattttgaatagccgcttctacatcttgtttaggcgtatttgcaccttgcgttttgttcagaattgtttctgctctgcttaccgcatttgtatacgcatcacgtttggctttatctgcatcagtgaagttaacaccttgtttaactgtgttttgatcatgaatagcttgttccaagttgcccatttgcgtattcaactcagttgctgcatttttagcagctgttacctcactcacatgacccgcacgatcaatttgtgatgagattgcagatttttggttatttgttaagtgtgataacgtatttaagttttgcttagcagtgttttgtgcatttcttaagttttcagcaccgttcaaaccatttttagcattattcacttgtgttgtagcttgggtaatcgcactagcatccatagtcggattgttagtttgattaatgatacctttcgcatttgacacagcgctattatatgttgattggttattcggacttgcgtctgtatagttttgacttgctttgactgttgtttcattagcaatactatctcttaagcctttcattgcattgttcaatgcttgtccatttgtttgaacggtttgtacgtcttctaatctattggcttgtcccacttgttcttttaatttagctttttgaggagtatttaattgcgttaatgcatcaatagcagtattggcgttttgttttgctacacgtaatctttcgtcaccatttaattcttgtttcgcgctgtttacttgattagctgcagctgttacttctgaaggtgtcgtaacaaccgttggcgtaccgctaataatatgttcagcattggtaactttagttgtgtaatcattttgtttagtgctatcggcgttgacatatttactgcttgctaacgtattcgtcttatctgcgatggcatgttttaatgtgcccattgccgtgttcagttcagtcgcattacgttgtacatcttgtgcattagatacgcgttgagcaccattagcttgtgcttttaatgcatctttttgtttttgatttaaatcagatgcgccattgattgctgtaatcgctgcttgtttcgcattatttaagttttgcgtaccatttaatgcatgtttcgcaccattaacattattaagtgcttgttcaactgcagttttcgctgtattcggtccagtttgtttatttaaaattgtttcggcagctgatacagcttgattgtaagcattacgtttttgctcatcagcatctaggaagttttggctcgctaatgttccggatttatcgttgatagccgtttgtaagttacccattgcaccatctaaactattcgcactttgcttaacagattcaacaccagctaagtttgtagcttgtgaaatttgatttgttaaatcattgcgttgtgctgtagtgatatgcgttaaagtacctagatgttgtttcgctgcgttttgagctgcaattaattttgcatcaccattcaatgcatttttcgcagtattcacacgttgcaatgctgcctcaactgcattttgcgcagtgtttggacctgtcgatttatttaaaatcgctttcgctgcagtaatagcattatcatactcttgttgtttatttgtatcagcatcacgatatttctcagatgatttcacttgagattcgttgttaataccattttgtaagttagccatagcttgatctagatgttgtgcattttgttttacagtatcaacaccactaactcttgtcgcactactaatttgactaatcaaattgttcttttgagcatctgtaatactcgtcaatgagtttaagtacgttttcgcattttgttttgccgtagctaagttttcatcaccgttaagtgccgttttagaactattcacttgatttgctttttgtgtaatcgtacttggattcatttctggattactgttcgcattaataatcgtttcggcagcagctactgcgttgttatatgctgtttgcttatcattattagcatctacgtaatcttcacttgctttagttgcatctttgttggcaatgctttgtcttaacgtattcatcgcttgatctaatgtattcgcatttgattgaaccgtatgaacaccagcgacggtcgtaccactattaatttgatttgttaaattcgttttttgagcagttgttaaatgcgtcatattatttaactgctgtttcgctgtttgcttcgcttgatctaataaacgcgtaccatctaagttatttttagcagaattcacttgattcatcgcttcagcaacttgatctttcgttttattttgaccatttgatttatttaaaatatctttcgcagcttgtaccgcatttgtgtatgctgttttcttacttggtgtcgcatcttgataattttgactattaagcgtcgtttgttcatcgttgatcgcaccttgcaagttacccatcgcagtatttaaatcagtaccttgttgtttaacagtatttacgccagcaatatttgatgcagcattaattttagatttaacatctgctttttgtgcattatttaaatgtggtaatgcatcaattgctcttgcagcatctgttttagattgtgctaatttttcatcaccatttaatgcatttttattagtagtaacagctgaagttgcacgattaacatcatcaacagacatcgttggattagctgtttgattaatgattgtttcagcacttgaaactgcactgttatatgcattttgtttagcggtatctgcatccgcataatcttctgtacgtttgacttgatctttatctgcaacagcatgttttaaattacccattgcactatttaagttagttgcattttgcttaatcgcattaactgtctcgatttgatgcgcaccattaatttgcgattgtaagttttgacgttgtgcattattcaaattatttaattgacctaatgcagtgttcgcttcttgcttcgcagcatttagcttagcttcaccattcaaagcatgttctttacttgtgacatttgataaagcattgttaacatcacttggtgttataactggatgttgtgcattaccattaataatgtcattcgcatggttgtatgcattgttgtaatcatttttcttattagtatctgcgttgacataattatcactttgtacgacttggttatgattagcaacgccacgttttaaacctgtcatagcagtatttaagctttgagtcgtttgtttaatatcatttactgcttgtacattttgtgcactatttacttgttgtgttaatgcattcttttgagcttggtttaaatcacttgcatgcgtaatcgcatttgttgcttctgttttcgcacgttgtaagttttgttgaccatctaaagcatctttcgtcgatttcacagatgctgctttttggttcactgtgttaacatccatcgttggattattcgtttctccaatgacacctttagccgcattaactgcattatcatacgcttgtttattagctggtgttgcgtcagtgtaattttgacctgatttaattgtattattatcagcaacgctttcttttaacttagtcatcgcattatttaaagctgtaatgttagacttaattgtttcaagcgcagcatgattttgagcagcattaatttgttgcgtgaaattattttgttgtgattggtttaagttagatgcaccatgtaatgttgttaacgctggctgtctatctaaagttaaaccttgacgtgctgtatttaattgatccttagcttggtttgcttcattaactttatcattgatattttggaccgttggattgccattcaacacttgattaatttcagttaacttttgacgcgctgcttgtaatttttggttgtacgcatttaacgaagcggtcgtcatacctgttgtatccgttggttgattaatgctttgttctaattgcgttttcgcattttgaagcggcgctttatctggtgttaaagcttgacgtgcatgatccaaatcagatttcgcttgatttgctgcagtcgtatttgtattaatttgatctactgtaggtgaacctgctaatacttgattgatttgttgaaccttattacgtgcagccgttaacttcgcattataagcatttacagagtcttgtgtcataccagttgtacttgtttgcgtgtcaatactatgttgtagttgatttttcgcattttctaaaggcgctttatcgactgttaagccattacgtgcttgatccagtgctgtcttagcagcattcgctgctgtcacgttttgacgaatcgttgcaacatttggatgagatgccagtacgcgatcaatttcttgaattttagttctagctgctgaaagtttttcattaaatgtagcaacagatgcgcttgtcataccagtcgtactcgttggctgatcaatatcattttgcaactgagttttcgcagcttgtaatggtgccaagtctggtgttaatccagcaattgcttgttttaagctattatatttttcttctactttagctttttctgcggcaatttgttgatctgtcgcatcaccattgttaataacattttgtgcatttgttgattctgtttgacccgcacgtttagcattttcatatgcttggattgatgattgtgtcataccatcagtagttactgatttattgatttcttcatcaagtttcgtcttagctgttcttaaagcactattatcagctaaaggtactaattgattaatagcttgcgttaatcgctcatttacacgatttacatttgttaatgcagattgtacctcttgcactgttcttattggcttctgaatgatagcattggcactatttttagcacttgttaagtcactttgaagtgcacgaatcgaattattatacgcagtaatacttgctggtttcttaccagtcgttgtacctgtgcgattcaattgttgcactgcttgctctaaggcatgtgtatctgcagttaaatcatgtttcgcttggtttaatgctgttaatgcgttatcgacacgatgtttttcatctgaaatttgttgtgcagttgcatctccattgtctataacacgttgtgctgcagttatttcagtttctgcttcacgcttcttcgcgttatagttatcaatactttgttgcgtcataccagcagttgatggaacttggttcacagaactttgtaagttatttttagatgttactaattggctattatcttctttattttgaagtaatgctttagcttcatttatcttagtttgtgcagcttgaactttagataatgctgcgttcacttgttgcggtgttgcacgatcattattaataacttgttgcgcttctgttttcgcagtattgatttgttgttgcgcattatgaattgcattattgtactgcgtaattgtacctggctttttaccatctgtactcactggatcatctaaatgatttttagctgtgattaactcacgtttatccgcttttgtgaaaatggactcttgtacttcttcactactgccatcattgtaagttactgtcacaggaatcatcgttgtgctaccaccagctaaattagtaggcattgctgtgccatttttaatcgttgcagtacgtttactagcaacttgaactgcattgttaatttcagctgctgttacattagaaccataatcttttacaatttcagttgtgttgacagtatgagttgccggtgcagttaatgtacttggattactacttgctgagtgacctgtacctgctttcggtgtaatggtaattactgaatttggcttgatagtattggcattgaatgtcactttaccagtttgtggatctaacgttacatagtcaggcttattggcgattgtccattgattattttgaccacgaacaacattaattgtcttactatgttctgcaccattacccattttttcagtataagcaatatccattgcttgagttggattaattaaatgccctgatgggttattaggcgtgatatcaatatgaccattttgccaaatcttagtagtcgcttggttcggttgaggtgcgacaactgtgaaatcatcactacgttgttcgtcactgattgtttcaccactaccttgtgttgcaacaacttgaattgtatcagcaggattgaaagtaccagctgcaacagtaataccattattagttccagcaatacctgctacagttgctgcagatgcttctttcacccatggactcgtattattatgacgagtaaatgtcgtcacaacattaccgttacgtttaataactaatttatcagcgtatgtcgttacgttaccggcatgtgtattcactgtttggtttgctccaggtgcgatcgtaattgcacctgctgccgattcagtaacaattggtttcgctggttggacattttttactacaaacttcgctggcagagatgttgcaaatgtatgtccattatagatgacatcatattttgcattaacgactttagccgcattcggtttattcattgctgcccagtttgcatcgtttgtacccgttgctgcattattccatttatacgtaaatccatctgttggtaaaccattagcgttttgcatatgtgcatatcctgatgcttgcgtaccacttgctaaagtgctaccaactgttgttgtataagtagtttgagggaattcaaattgatatacattaacagtaacaggtacacgttttgcagctgaaatacctggatatgtgacatcgacatttaaatgttgcacgcctgcttgttggttattaggttgttgtctatttgcccatgctgcagtgataccatttgtgtttgtatttggatcaaatgtaatgtagttcatcgcatctgttccattagtcaaattttgacctttcacatcacgtgatggcgccttagcattagcaactggataaacttttactggaacttcaacattacgcgtaccttgaccactaggtaatgttacaaccgcagttttatgagtgttgccgactgtattcttccatgtatctggattatcatgccatgcaaccgttgctccatgtggtgggttttgaataaatctttctacgtgtccgaaatcaaaaccgtcgccacctttaataaatacagcgccttcagtagttgcttgtaattgtggtgtcactgttactgttgcactgtcatttgaatcaacagattcatttcttgttactgtaacaacttgaccatgttcgtcttgcgtcgtatacgtcacattgttcattgaaattgaagattttgctttaattccgccatttggtaacgcgtcacttactgtcacaaccgaactaaaaccactaccatgagtaatatttgtgacatttaatggtgtattatctgctttaaataattttactgacgagttatttaatacgttattaactttaatttcttggtttgtaagacccgctttgtatgtcacagaatttgcgtcaattctcggtggatccggcttaactttagataaaatagttaaatcttctgtttgtctattatcatatgtcactctaataagacgagtagatattcctacaacatctttgttaggaccatatgttccaacaaattggaaattcatatgttgcgcatttgtcgaccaagaattatttactggcttaacatattgtttcgcatcatacatatctgaaacacctgggtataacacacctctggctgtttcaaagacatgtttcggtacagttcttactactttatatgttgctgttttcgtaatcggcgttgtttcgccatcaattaagctatttgctgttacattaatatcttcaccaatacgcgtattatctttatttggcgcttgtccacttacccatgtaatagttgcatctggaatggcactaccattagataatttaaagtaatctgctgcactagaaccattacctgctgggaagtcttggccttgtacagtgtaatgcgaatgtgcaacgatttctggaatgacatgctttacaggtacagtcactgttgatgttgttccatcttgataagtaacagttactgtgacattggcattatttccagtacgactgacattactaactgttttactagtgatttcatttgcgcttgctgttgcatagtttctattaggtgcattacttgtaaacatcaatgaattaataattgctgtttgatcagcttgtgatactgtcgcattattcgaaatattggcaattctcacaggattagcagccgttgatgaagtaccaactcgatatttatcacgcaaaggtttcactgttacattgaatgaagttgtagctgtattaccacttgtatcagttgctaataaattgattgtcttactagttgctgatgtcacatttggtgctgttgctgaaacatgttgatggttattatcaacagtacctgtaatttgtgatgtagttggtacagttaccgattgcacaccaaagttatcattcgctgtaatagtgtttgtaaatgtttcacctgagaacacttgatgattagtgtaattacctactgaaattgttggattcactaaatcacttggtacaaaataaatgttaatagcatcagtagtatttcccgtattttgatttaaatgttcaacatattgttttggcccatatggcgttaagtataactgtgctttataaactgcatcacttgcattatgtgtagaattactttttacaacgtggtcaattgtaaatgcgccagcaccattagctgccggttcgtttacgttaacaacagttgcgttactatggtttgcacgagtatttgaatttgtaacaggttgcccaccataaccgtttgaagggttgatgatgtctaatatttgaatcacttgaccattcaacgtatattgtctttggccatcagatgatgcatttgcttgtgaataaccagttgttctatagtttggtcttccacctgcttgtgctttttcattaccagtaatattattacgcaaaccaggcactgtagtagtcgcttttagcatcgttaaaatatcattagttgtaatttgtgtgcctaatgtagcatcataacgataaattaaagatttatggtcatcggaccatgataaaccaccatctgttggtctgtttgcaatttttgcattcgtccatgtcactgtataatcttgtgggaaattaacccaacgcaagaaattcatattagctaggttagacgcgaatgatttcgttaatcgacctttattaatatttactgtaatagtagttacattagcaccattaggtgtatttgtaactgaaatatcaccttcggcaagagtaattacatctctatttgcattaataaaagcttgttttacttttgagatttcatcagtagttaaatcatatgttgacgtacgatacacacgttgatcgccttcaggttgtttcacatcaacgatttttaaactaatatagaaatcttcagtgtctttatgatatgcatttgaagcaactaaatgatataactgcgtacctgcattcatttgactaacttcttgtgcagttggaatagttctatcagatgtaatatttgtaaatgttccacttggaatagcttgtccattacttaaagtaaaatattgtttaatatcaccaatactaaatgattgtcctttagcaatcgttaccgttgctgttttagcagcattggcagtttgatattcaggtttcacaactggttcgtatgtcatcacatttgtagcatcaagcgttgttgatgagccatcacggtaatgtaatgtaacattaccattattatcgacagttactggattagttgaagctaaatatcctcttatattttggtttttattcataaaggcagtaattatgctttgcttttcatcattagatacggccgtcggattgactactacaactttctcagtatttcctaatacaatcggatgagcatcttcactaattttacctacatgaattgacacatgtttagattgactatcatttgtcgtattattggcattatctgtcgctgacactttaaatgtaatatcactgttaaatgcctgattcatactcactctacctgtaattgataatgagccattattcttatccgcttttgttaaatttgatgtccaaccattcggcaaagtagtaattgttgtattttttattcctgtatgtctatcagagacacccattgtaaagttgacttcgtcgcctcgatagtatttggcatttattccaacaggattattaattgttggtggaatgtcatctggcaaaatagtaacagcattactcatattagaggcaaccacattattgtaaaaaactaccgctctaacttctttacctactggaggtataaatactacataatcttgcggtcgaatagttattgttgtatgcacaccatcaggtgtaccagtcgccagttttgtatagcctgatggtatttgatctgcttcactacctccactcgttgtttgagacgtaggtgtaactaaataaactaatgccgatggatccaatggaattcctgaaattgttaccggtactttttgtaatgctgtacctcttaattcctctgctgtcgttgtaattcttggtgtatgtggtttaacacgaatttcgaataattgttctttacgtccaaaacgtatcgtgccaaagtaatcccctggtaataagttaccaacaagttcaatattgcgttctctggcattattaggtctatttgtcgaattttcaatgtgtaatgtacgcggaataccagtaatttgccaatctttatctgtaaaattctcattacttgttaaattaatacgtaatggttgaatagatgttacgctaccacctaaattcacggaagcattcccttgattacctgcgtatacataaaaaactggatgcccagcttgttttgaaaacggcttatcagcaatattttgagtatcgtcatttttaaagaatttaatattatgttggatttcaggtaataccgttaagttaacaggaactaacgtttcactatttccatgaccatctggatagtcaaatccaatcattagtcgtatcggcgttccagttctagctgcctgttgtaatttatcatcagtgaataattgacttaattgatattcatttaatgggttggttccaccaggtctaaagccatttgtgtttgcattactcgggtaaaaacctaacactttattactcggcgtcttaacataacttaaaggatcatcaacaaaatcatctatatttaggtttgtactttctaatacctttttcgtttgtacatttccttgactcacttctacacgtttagttgtaccaatgcgataagtacgattaattacttgtctaaaaccatttagacgttgttggtagtcttgtgttgattcaacgtataattggctgtacataaataattgattgtactctaaagctcgcccaccagctgcataatacaatttatttgtcgttggaccttgcgttctaaacgaaatagtataacttgcatcaccagcaccaataaaagtataaacttttgatgcaccaggcgattctgtcggtctttcaccattaatatatttaaatgtttgttcccctaatgctttagttgcagctggtgcatttgcttcactaaaataatctcctgcacgcgctaagtctctcaaagtatttacatgaacatctgcccaatcataaatgacttgtccgcttctatttctaattttaaagtctcgcgaacgagaatcatttacaccataaggccacatttctggaagaggcttatacgcacctgcccctgcaccattactccattgtacatttgtaccatctgcattcacggtaacaaagtcagtgcgtccaactggtacttgatctgacggtaatgcaaaccaaaatatcatattatcatgcggtgcatgacctttgttaaatttaattacccattgataaccgtcaccagtttgtttcgctgtcataagaacaatttctttagcggctgatgcttttaacgtattccatggagctgtaggaagataatatggtgcccccttatttgaagcgttgatatatgtaccaacaggataacccgaaccgtcattagcattttcaacatagtatgaagagtctgcattttgataacttgatactgatctaggctctgcagctctagactcaatagaacgcgtttgaattctacttgaacgtcggctagtctgttgtctttgaggcattgtacgaattaaggcaacagcttgttccaattctttgtatgcaagttgcaagtctttattgtttattggatcattactgcctaataacgtattaatcttatcaaaaataccttttacatagttaaatgtgccagaatctgcattttcacggtcaataaagcgataatcatgataatttgcatcaaaaaatgcttgtaattcatttcggtcatgttgtacgttaccattatcagatgaatctgaagctgttactacatttgcttcatgattttctacatgagccgctctattgtcgtttccatttttattagcagattgactttcgttttgtttatgcttacttttttctttatctggttgtgttgtcgcagccgttgccgaatctttctttgtatttacattttgagatgctggttgttcatcattagtagtagatgattgcgctactttttgatctactaaattagcttgactaatatttggttgctcattttcacgagtagcagataatgattgaccattttgtgaattttgagaattttgtgcttgagattctcgattctcagtctgttcattattactttgttgtttctgtttaaccacgcttgctggttgatttgtttcagcagcatgtgcttgtgatgtattgaatcctaaaaataccaatgtcgcaatgacagttgaaaatgtaccaactgtatatttacgaatactaaacttttgaattttatcacgataattcacagctattgttcactccttatcttgttgttatgtctctgttgtgttgtgaatgtatttacttttgattgcttgtgtattgtaatgctcattccattctcatttaaaaatttaaaacgatgacgattcaatacaatttcgcaatctatccaaaaagtattgaaacacattacaactatgtgttgaacaatttatttatgctccagaatataataacacaaaatatattgtaaggtaaattgaatttgtgacaatttataataattataaataaagtagcgtaaaagagtaataaaaaaccaacccctatgttcatttaaaataatgacacataagaatcggtttatatttttgtttaatattgtagcgacttgtatgatttcaatttaattctcaattatcataattgagtgtcgttttgtttaggcacaagtaacaaaatgataacgaatgataaaattgccattcctgcgtttaaccataatgcaatcattgcacctgtataaatgtttgtcatatttgatacgattgcataaactgcaccactcaatgcgacgccaaatgctccacctaatgcagaagccattttatagatacctgcagcaacgcctactttttctaacggtgcatttgcaattgctgtatctgttgatggtgtagcatatatccctagtcctaaaccaaagaataaataacctataatacaacaaatgacatacaatatttctggcaagaaagttaatgaaatgagacattctccgacaataagaactcctgttccaattaacattggtttcttgcatccgagtgtttgaagtaacttttcaccaacacgaatcataattagtaccattactaaataagtgattgataaacttcctgcttgcaatgaggaatatcctaaacctctttgaacaaatgtgttggctactattaatgttccagcaacaccatttaacaaaaagtttgaagctgttgcacctgtgtaagctttatttttaaataatttaaaatcgattaaaggatttgtagcacgcttttcaagaactataaataaactaaaagttccaattgcaattgctaataatgtgataaaaagaagtgaggttacacctaattctgatcctttagtaattaaaatatttaaactgaggagcataatgactaaaagaaccagacctttaatgtcaaatttatttagagaaatcgatttagatttagtttcaggtgtgcctttaataagaaacagcgcaattaatgaaattataattgataggatgaaaatccaacgccaacctaaaagcgttgcaactgcacctccaaaaaatgaacaaacaccagagccgccccatgagccaattgaccaataacttaaagcgcgttgtctatctttcccaatgtaatatgacttaataatagacaaagttgcaggcataatacatgctgctgaaagtccttgaattaatcttcctataataagtaataaaggaatatttgaaataatgattaataatgaacccaatatatttaagataataccaatgttcgtgagtttaattctgccatatttatcagcaagaccacctgctcctactacaaacattcctgaaaataaagcagttatactaacggcgatattaaccgttccaatatctgtattgaaactatcttcaagtattggtacaacattaaccaatgattgtgcaaatagccaaaacgttattacacttaaaacaatcccaattaacaacttattattgccttcaaatgcctctcttgacggcttttccatctctatttgcctccctatacttttgaaaacagacaaattacataacagaaatttgtctgttccatagaataattgaatggtttttgattttaatgtgtaaaactttaaatttattagtagtccatccatttattctcaatgctagttatcttaccttatgctgctttttgtttcttcttatagtaataaactggtataccaagtgctgttattagaatgccaatgattgctaatataaattgtgtaaacagtgtattaattaatacaaatgatcctgccaaaatagcaattaaaggtatgattggatataacggtactttatatggtcgctccatatttggttcgcgttttcttaaaataattaccgctacaaatgacatacaatagaacaaccaaattacgaagattaacatatttgtaatcgtatcaaatgctcccattgacatcatgatgatagcgattataagttgtataattgcgccaaaccatggtgcgccagattttgttaattttgcgaataagtggctaaatggcaataattttctttcagccattgcatatggtacgcgcataccagtcatagtatagccattgatcgtaccataaacagaaattaatataccgattgtaataatcttaccgccattttcaccaaataatatttttgatgtatctgaagctgcatttaaattaccagcaagtagttctattggcaacgttaataagaatgtagcgttaattaataaatacacagccataatacaaccgataccaactgaaatcgctaaaggtaaatcgcgtttaggatttttaagttcccccgcaacatttcctacatgaatccaaccatcatatgcaaacatagttgctaataaaccactaccaattgctgtaaagaaaccatttcctgaattacctgtagttggaattaatgaaaaagtgatatctccagattgaaaaataccaaaaattacgataacgatgattggaatcagtttaattactaatgtaactgattgtaaaattccgcctgcttttgaacctaggaaatttatcaacacaatagataacgcagatgcgattgctattggtattaacgaacctatagataaatggaataaattaattaactgtgtcgcaaatacaatagacaatgctgctacgttagctggaaaataaataaatgattgcgcccaacctgataggaagccccagaaatcaccgtatgtatattctatatacttcgttaagccacctgtttcagggattgcagcagcaagttctgctgctgttaaccccgcacaaatggtaatgatgccgcctaggaaccatacaaacaaggccattcctgctgttcctgttacttctgttacgtttgatattttaaagaatactcctgaaccaataactgttcccataacaatagcaaacgctgagaagaaacctatatttttttgtaattctttaccatttgacataattacacctcatttttaagattaaatgttttaacctaccacacccttgcttgtatctgcaatattcagtccatgttcaatgacacctgaaactctagttaagtcaacattcccgcctgaaactaaagcaacaacatttttatcttcaagccatttattgtttatttttccacttaaaattgcagctgttggtaatgcccctgcaccttcagtaataattttggcacgctgcattaaatctttcatagcatgttcaatctcttcttcagtaacaagaataaactcatctactaaatgtttaactacttcatatgtttgttcaccaggaacttttacatcacaaccatctgctattgtgctatccactcgatgttcagttaaatctctcttatagaaagactcagccataccatgaacattctcagattgaacaccgataatatgaattgaagggttaaatgattttaatgcggtggcaatacctgcaattaatcctccaccgccaactggtacgatgactgtattcacattccaaatatcatctaaaatttctaaaccaattgttccttggcctgccattacaaacttgtcgtcatatggatggacgattgtcatgccattttctttcgctaattcttccatataaagtctagtttcgttaaagtttttaccttttaaaataacctttgccccatagccttttgttgcttgttgtttcgcttgtggtgctgtttcaggcattacgatagttgcatcaatgcctaataatttagctgttaaagcaacaccttgtgcatggttcccagcagatgctgcgataatgcctttttctttttgttcatctgttaagtgattaattttattgctagcgcctctaaatttaaaagatcctgtgaattgcatattttctaattttagaaatacattccctttagttatactttggcttaaatacattgatttaattagaggtgttcgacgaataaatggtttaatgcttgctttagcttcttcgatatctcctaaacttacaatatgtgctgtttgtaatgtaactgtgttggttgtcataataattacatccttccgttttgtaaatttttagtccaaactataatgctatatttaaaatattcatttcactcaatttcatttaaattactatctattcgataacatttaatatttctttataatctaggtcatgtgatgtagctaatccttgatttgtcacttgtccttggtaaatgtttacaccagtacttaatgcttcattatctttaattgcttgttctaagcctttgtcacaaatttctaatatataatcaatatttccttgtgctaatgccattgttgaagttcttgggactgctcctgattgatttggtacaccataatgaatcacaccttcttcttcatacaccggatcagaaattgtagttggtctaattgtttcaatagttccaccttggtcaatagctatatcgattaatactgaaccttttttcattgatttaaccatctcacgagtaaccaattttggcggtttcgcaccaggaattaaaattgtagaaataaatacatctgcttttttaatttgttctgctaaattttctggtgttgatttgactactgtgacatctttttctgcatacatatcttcaagatatttaatgcgatcatcgtttaactcgataatgattactttagcatttagtcccaaggcaacatttgctgcatttgttgctgctacgccaccaccgaaaatcacatatgtactaccaggtatatccacattttcatgtacaccagtcactaaagtaccttgaccaccatgttgtgcttcagagtagtaagctcccataattgctgagcgttgacccgctatagcactcattggcgctaataattctgcttttccattttttataatggtttcaccactaatcgcagtaacaccaacttcttgcattttttctactatttcttttgaagatgctaaatgtaaaaatccccagatgatttgattctttttgaaatattgatattcgctttcatgaggttcttttactttgataacaagatctgcttcccatgcttgttcgtgagttacgatcttagcgccttctttttcatacatatcgttagaaaatcctgaaccaatgccagcatttttttcaacaattactttatgtcctgcagccgttaacttacgcacattttcgggtgtgcaagctacacgtccttcaccttgttttaattctttgactactgcaactaacatttgcaacactcctctttcgtttgtgaataatttcacaattattttatcctttggttatgaatatgtaaataccattaattattcatattttatctataatttgttaataaatatttaatatattattcttattcttaaatattatgtgcaattataccactatatttatttcttatactccatttgatttatagttgtattaatacattgactcaaaaactaattaatcaaatccatttttttaatgaataaagttgtaactgtactattttgtagtgtatggtaatttatttggatgaaatataattctttaaactctattgattaatcaaatatgtatcaatcaaaattcggcttatttattctctttgacatatccaaatacgcaaaaagactatttctaccttgtatcgatagaaatagtctttttatacttaattggtttaatttttcataaaatcttatactctttaaaaatgggatgaaatatattttcctgaaacatgtaattcatgttcgttacaaattgataaaatatgattaagcgttgttgcaaatgacattttctcaaaaagtgcatcactatcaattggtacttgtgtgtgaatttcagccagtcgcttcgataaatatagttcatctaaattgtcattaatcttattacgttgcccagctgataatgcatcaatgttttcaaccacattttcaacgctttgatattgctgaattaacttaatagccgttttctcaccaattcctttaacacctgcatatccatctgctgtatcacccataaacgctttaatatcgattagttgttgtggttcaagggcatattcttcgttaaaacgatgtaatgtatatctattataaatgttaaaaccttttttaattagccaaacttcaacattgtcattaatacattgcagtaaatctttgtcgcccgtaattatatagacatcgttatcagttgaatattgttgtgctaatgtacctataacatcatccgcttcatagtttttaacgccaatatttacaaagccaaattgctctgaaatttctttaacataatcaaattgtggtatcaattcttctggtggtgcagaacgattttgcttataaccatcaaacatatcatttctaaaagttgattgtcccatatcccaacatacagctacatgtgtagggcgtatttcatgtattgccgaaaagatatgacgcacaaatccttgtattccatttgtaggtacaccttgtgaattgtacataaattgtttatgaagacttgtagcatagaaatgtctaaataatagcgccataccatctacaagtaatattttattaggcatttaaaacgttccttctttcttaatataaaatagttttcagttgttgatgtttatctttcaattgattgatgagtgttgtatctaaatcaaatgctaataaatcgtttatttgcgtttgaatattagcttcaaaactttcaaattgcgattcagcttctacagccatttgctttacatataattcaagctgttgcctcaatattcccatttgtggttgtaataatcttaacgtactttgacaaattgattcatgtatatctctttgcccatttggattcaaaattttacgttttgttaattgtttaggcaatgcatttagcatatcgttgaaatcgatgtgcaataatggttgctctatattagctgattcaaagttaaactgaggattaacaatgacatgtaaatttgctaattgttgaacgattggtgcaatttgctcagtgagttgcttattaaagtatttttttatacgttctgtaattaaagattgctctaaaaacaatcgttgatgaatttgatctaagtatactctcgtagacactttcttttcttcattaaaatcactattttgcgtcatttgagaattaaacactgatttaacatcgtcaagtagttgtagttttaaacgggcatttaaatgataaacttgttcttcaacttcgttgtctgtatgttgtaacgtcgcatcaattaattgatgttgtaaacgctgtttatctttatagactgttaacctttgttggcgacgtgaaatatcagctttatttgtttcaaattctgtaatcatctctacataagaacgatccatttgttgaagctgatgaatcatttgttgttctaaaattgatttagattcaacatcaacaaattgttgtatgctttgttttaattgatcaatacccttatcttcagcttgcaatgcatttcgacttgatacagcaaaaatgtctgattgtaagtgtacttgtcttaatgcatctgatacatatgtttcaaccgcttcaagatcatcttgactttctgctaaatcagcagcattaattaccattttaaatgcttggttttcattcaactggttcatatctttcatgtgttctataaacgccttgtcattatcagtaaatgaatgattaaaataacttacatacaatattaagtctgaagaagttaaaatttgctcggtttcatttgtatgcctttggttatttgagtgtagccctaatgaatcaacaattattttaccttttaaccaatcatgcattaatgcaatgtgtactgttttaacaaatgttgcgtattcatcttctgcactccactttttcaattcttgttgattaatggcatgtttttctccattttccaacatattgacatacaaattataatgtttttcaactgcatgaacaaaagcgagttgatttttatttaaatgtgattttaacttttctaaatctgaattaataaagtcttctatagttgaaaaagacatattttggtattcaactactgcattaatttcatctaataattgcgattgtgattttagcgttatataactctcatctccataagatatttctgtagtagctgctgtagtaggatttggagaactgactaaaatctgctcgcctaataatgcatttatcaaactacttttacccgcactaaatgttccaaatacacctatttttattaatttattatctatacgtgttaatgtttcgtggatatcctgctttgtacgcttgaacaaaggcacatccgaaattatatcaagtgctttttgaatatctatagacatatttgttgtagctgtattttgatttagctgctgattatcacgattatcttgagcattatcagtagccacttgatatgttgtctcttgtcgatctactaatttatctagagattcatctaaatgaatatagtagtgacgataattcttagtcgtcaatgattgacgcagctcatttaattctgtataacgttgatattcttttaaatcatcactttcttctgttggtaattcatctgcctgcacattttctattatttctttaaaaatcggtgttgattgttgttcaacatatttcttaatggctttaaccacttcgtctgaaaatgtaagtacataagtattgctgattgatgtttgtggttgatataaaccttcaatcatttccggcttaacgtcataatgctgatttaatactttatctgaagcttcttttttattgataaaacgcgtaacaaatgacatatcttctcgcattggttgacgaatttgttgattaacatgttcttgtaacgcatctgtcgctgttaataatcgctgttgttgaatttgtagctttttcttctttttattaaaaagtccaccaacattaaagtcttgagacatactttccaaataacttcgtaacatttctctcatattatgcggcataatgtatgcattttctaaaatatttttacgcttattctttaaaaatgccattaattcatctggattatttaaaagttgtgcctcttcactaattgcttgatgttgttgactatttaaaaatgcttgttcaaactctgcttcttcgatacctaaatcttctagtacttcctgaatttcagactgaatgtaatctagctgagcttcggtaatatattcaaccgttcttgatgtataatcctctattgtctctctatgttgatctaatgaaattagataacttgataatacttcaagttcattttcagggtgatcaaatttcgatacataaaaggtgcgttctaatttaataccccaatctgcaattgatttttcaactcgtgatttaaacgtagagaatgacaattcatcgtcttgatgcttgtcaatttgattaatgataaacacaacaggtattccaacatcatttatatgcttcataaacttaaagttaagttcagattgaacgtggttatagtcaaccgtataaaatatcatattacttgtatacatatattgttctgttattgactgatgtgatgcaacatttgaatcaacacctggtgtatcttgcaacgtaaacccatttttaaatttagctgattgaaaattaatttctacagattcaacgtcgacattttggcgattcatttcccttacttcatcataattagataatttggcatacgtttgattcggcaaattagcaataatatcatgattgtctgaaactgacacgatagcagtattacttgtcgttggtacaggtgaacttggtaagatatcttgttcaattaataaatttatcagtgtcgatttacctgcagaaaaatgtccaacgaacgaacatgtatattgctgcaaatatactttcttaattacttggttaattgtatgtaaaagtgcttcatttcgcgacttttcaacttctttttttaatttatataaaagatctaattgttctttattaatcatgttactttcccctttggttcgttcacatagaaatgcttgcttgttaaaacgaattcatacaatatcgatgtccatttaaacatagatcgttaaaaggctcgcattgtattatgtttaaattttatcatagctgcttgataaaacatacgaataatcaattttcttcaaacattccaacttaaaagttcatttttctaaaaatcacaaatcatcgttaaatttttctagaaaacaaaatattgtcacagtttgttcacacacgtcacagaattgacaccgtataatagccaattgggagggaaatatgaaaaatacatttaatccattacaaagattacatttctatgcagcaatatttattgctccactgttaatcactttaaccatttcgggcattggttacttgttctttccagaagttgaaaataatatttataagaatgagttttttggtgacagtgatgtcaaaacgcatcaaacattgaatgatgcagtacatcaagttgaacgacaatatgaaggattctttgtaagtaaagttagcatacttgatgaaccatataacaaacgaattacactgagtgatatggcaggaaatcagcgttacgtctttctagatcataacaatcaatttgttgcagatcaaaatgcgaaacatacgtattctaatgtgatgcgaagtatacatagttctttgtttactgaaaatactattattaattatttagtcgagttaaccgcatgttggacgatattcatgattttatctggtacttatttactcattaagaagcatttaatttctaacaaaagtaaggcacttcgttggcaaaagtggcacgcaatgattggaattatcattgcaattccagtatttgtattagttttaactggattgccatggtctggttttatgggcagtaaaattgccggtatgatggacacaaacggtgaccttggtcaaggtgaattagcgattaatccacctaaatcagatttgaatgaattaccttgggctacacgtaaaaataaacagccagcttcatccgaaaaaggttcaagtagtcatcatggtaatgcagcaatgcctcaaaccaaattagattatcaaatatctattgataaggtcgttgaacaggcgcaaaaatctggtattaaaaagcccttttcaatcgtatatccaagtgataaacatggtacctttattgtatctaatactagtaattcaggtgttactgggctagatgtatcaccttacaaggaacaaacactttatttcgaccaatatagcggtaaaaagctaggtacgattaaatatgatgactacggtattattgctaaatggtttacatggggcattccgcttcacgaaggtcatttattcggtattttaaacaaaatcattaatttatttgtatgtatcgctttattagtagccattggtatgggatttgtctcttggataaagcgtacaaaaaatactgcagtaaaagtaccacatcgcgtaaaaaaaccagcatctatatcactcattatatgtttaattgtattaggactattaatgccattatttggattatcacttatcctagtatttataattgaattaatattatatattaaagatcgtcgtgctaaacaataatgcacttaaagttttgaactgacgaaatttacaaaatgattctcgactctctaattacttaaaacgagttctataataaatcggacagataaaaaagcatctaaaacgtataagaagattactttacttcttccaaattacgttatagatgctttttattaattcatatgcatgtcgtgaattttcatcattaaaccgtgtgggacgtcatcatgtttaacaatctcttgtttataaaatgtcttcccatcatctttagaaactaattttacaaagtctccttttttcggtttaaaatcatttgatggttctactttgatattatgtttgactaatccatctttttcactgacaactttttctgcatttgtattactattcatataaccaaaataagtcgttttttgactagaaaaaatcattaaacatacaacggcaattccaataacaaccaatgctatagataaacctagacccatttttttacccatttatagactcctccattttcaaaaatacctattatcatgagaacttaattattactaattttagtcacgcattagaaacattttagttttcaatagttttacgttctgtctttttaccccagtattgataataagtacattctatatatccattaaataacttacgtcgcttcgttgctttacgatctactaaatattcaaattctttattacttgttaaaatgtatgtagataaaaatggatgttgtttcattagtttaccaatataacggtacatttcttctacttcttcacgatcaccaattcgttcaccatatggaggatttccaattaacgccaccggttcttctgtatcaattgttaatgtattgacatcttttacactaaatttaataatatcagacaacccaacttcttcagcgttacgcttagcaatctctaccatttcaggatcgatatcagaagcatatacttcgatttctttatcataatcagccatcttatccgcttcatcacggtaatcatcataaatatttgctggcatgatgttccattgctctgatgcgaactcgcgattaaaaccaggtgcgatattttgagcaattaaacaagcttctatagctattgtacccgaaccgcaaaatggatcaattaaaggtgtatcacctttccagtttgcaagacggattaaacttgctgccaacgtttctttaattggtgcttcaccttgtgctaatctatatccacgtctgttcaaaccagaacctgatgtgtctatagtcaataatacattatcttttaaaatggcaacttcaacggggtatttcgcacctgattcatttaaccaacctttttcattatatgcgcgacgtaatcgttcaacaatagctttcttagttatcgcctgacaatctggcacactatgtagtgttgatttaacgcttctaccttgaactgggaagttaccttctttatcaataatagattcccaagggagtgctttggtttgttcgaataattcgtcaaacgttgttgcgttaaaacgtccaacaacaattttgattcggtctgctgtgcgcaaccataaattcgcctttacaattgcacttgcgtctccttcaaagaatatacggccattttcaacatttgtttcatagcctaattcttgaatttccctagcaacaacagcttctaatcccatcggacaaactgcaagtaattgaaacatatatgattctccttttatacaggtattttattcttagcttgtgtttttttatacatttccaacaaatttaatcgctgatacattaacgcatttgcttatcattttaaaacaaggcagtgtcattatatcaagacaaggcgttaattttaagtgttcttttcatgaaaaaagctctccatcatctaggagagctaaactagtagtgatatttctataagccatgttctgttccatcgtactcatcacgtgcactagtcacactggtactcaggtgataaccatctgtctacaccacttcatttcgcgaagtgtgtctcgtttatacgttgaattccgttaaacaagtgctcctaccaaatttggattgctcactcgaggggtttaccgcgttccaccttttatatttctataaaagctacgtcactgtggcactttcaaattactctatccatatcaaaagacttaggatatttcattgccgtcaaattaatgccttgatttattgtttcatcaagcacgaacactacaatcatctcagactgtgtgagcatggactttcctctatataatatagcgattacccaaaatatcacttttaaaattataacatagtcattattagtaagacagttaaacttttgtatttagtaattatttaccaaatacagctttttctaagtttgaaatacgttttaaaatatctacattatttgaagatgtatttgttgttgtattattcgaagaaaaacttttattgtcctgaggtctagatgttgctacacgtagtcttaattcttctaattcttttttaagtttgtgattctcttctgataattttacaacttcattattcatatcggccattttttgataatcagcaataatgtcatctaaaaatgcatctacttcttctcttctatagccacgagccattgttttttcaaaatctttttcataaatatcttttgctgataatttcaatgaaacatctgacattttttccacctcattagaaactttgatcttcagaccactgtaagtcattgatgaatgctgttaattcatcgaacgtcacaatatcacaagtatagtttgttttatccataaaatcaactaacatctgcttgaagaacttaggactcgcctcttgttcctcatcataaatgagcaatgtttgatccgaatgttcaagcataaattgatctgcttgtttaaattgaaagggaccttgatacgacgtatgaaaaatactatcaacataatctgcatgcttaattatgttagcatacttactttgattatgttcattccacttttctgtatgtccttggaacggtgtaattacagcaaactttaacgaatcatatgttcgttgtaattcaataacaacttctgcagtccataattctatacccatttgcccttgtattaacacccattctaatccttcatccaacagttgttcaattttatgttttataaattgttttaaataatgtacttcaggtgcgtcatctttaaaaatgtttaattcgaatgatttgtaacctgttacataaactgttttaaccataagtaccctctttagttatgccatctaatatattttgtaaatcatattgaacacttttaagcttttcaataaataactttcgacttgttcgcttaaaatgacattcgacagaaagttgttcaatgttagcaatcagtagctcaaatttccttgaattcatataaggtacttctataataaattcacgatgtaatttgatctcattgagcaagctatcaatatgttcagtatatggctttacagtttggtaaaaatcatgatcttgttgttgtgatttcacattttcaaaattttgttgcatgttgttaacttcataaattagtgattcgactacattattcatgaggacgcctcctacattttttaatttatcacaatatactgtattcgtcatgttttaacactctatataatttgatttaactattttttcaaatgtgttatctgttaaatcaagtaaatctaaaaacttcctatataaatacaaaattttatcgtgtatgttgttatacgatgaaaatacttttaatctaataaaatcatttaaatcaaatacacctctgctgattaacaacacatacttgtacttgcctcaaaaatagtaatttctgagcatgatttgacttttataacaaaattcaaaaatattgtaatgagtattcatttttataagcaaaacttttcaatcaattaaaattgtgtgtaaaattccaacattaacgataaatgtattataatattattgtgttaatgctgaaatcacgttaaaataagctttggtgtattgtgtctttcgcatttatactaatttaagtttggtgtttcactataatgttgtgtataataaacaacgtttactaccaaacttgtgtggtgaaatttatgaattatccaaatggtaaaccatatcgtaaaaatagtgctatagacggagggaaaaagaccgctgcctttagtaatattgagtatggtggacgtggtatgtcacttgaaaaagatatcgaacattcaaatgcgttttatcttaaaagcgacattgcagttattcacaaaaagcctacgccagtacaaatagttaatgtcaactatcctaaacggagtaaagctgtgattaacgaagcttattttcgtacaccttcaacaactgattacaacggcgtttatcaaggttattatattgattttgaagcaaaggaaactaaaaacaagacgtcctttcctttaaataatattcatgaccatcaagtcgaacatatgaaaaatgcatatcaacaaaaaggtattgtgtttttaatgattcgttttaaaacgctagatgaagtttatcttttaccctattcaaaattcgaaatattttggaagagatataaagataatattaaaaagtctataacagttgatgaaatacgaaaaaatggttaccatattccttatcagtatcaaccaagattagactatctaaaagcagttgataagttgatattagatgaaagtgaggaccgcgtatgacggaaaacaaaggatcttctcagcctaagaaaaatggtaataatggtgggaaatccaactcaaaaaagaatagaaatgtgaagagaacgattattaagattattggcttcatgattattgcatttttcgttgttcttttactaggtatcttattgtttgcttattatgcttggaaagcacctgcttttaccgaagctaaattacaagatccgattcctgcaaagatatatgacaagaacggagaacttgttaaaacattagataatggccaaagacatgagcatgtaaatttaaaagacgtgccgaaatcaatgaaagacgcagtacttgcaactgaagacaatcgtttctacgaacatggcgcacttgattataaacgtttattcggtgcaattggtaagaacttgactggtggatttggttctgaaggtgcctcaacattaacacaacaagttgttaaagatgcatttttatcacaacataaatctattggacgtaaagctcaagaagcatacttatcatatcgtttagaacaagaatatagtaaagatgatatcttccaagtatatctaaataaaatttactattctgatggcgtaacaggtattaaagctgctgctaagtattactttaataaagatttaaaagatttaaacttagcggaagaagcttatttagccggtttacctcaggttccaaacaactataatatttatgatcatccaaaagctgctgaagatcgtaaaaacactgttttatacttaatgcattatcataaacgcattacagataaacagtgggaagatgctaagaaaatcgatttaaaagcgaacttagtaaatcgtactgctgaagaacgtcaaaacattgatacaaatcaagattctgagtataattcatacgttaactttgtaaaatctgaattaatgaataataaagcattcaaagatgaaaatttaggtaatgtattacaaagtggtattaaaatttatacaaacatggataaagatgttcaaaaaacattacaaaatgatgttgataatggtagcttctacaagaataaagaccaacaagttggtgcaacgattcttgatagtaaaactggtggtttagttgctatatctggtggacgtgatttcaaagatgtcgttaacagaaaccaagcaacagatcctcaccctactggttcatctttaaaacctttcttagcgtatggacctgccattgaaaatatgaaatgggcaacaaaccatgcgattcaagatgaatcttcatatcaagttgatggatctacatttagaaactacgatgtgaagagtcacggtactgtatcaatttatgatgctttacgacaaagtttcaatattccagctttaaaagcttggcaatcagttaagcaaaatgctggtaatgatgcacctaagaaattcgctgccaaacttggcttaaactacgaaggcgatattggtccatctgaagtacttggtggttctgcttcagaattctcaccaacacaattagcatcagcatttgctgcaatcgctaacggtggtacttataacaacgcgcattcaattcaaaaagtagttactcgtgatggtgaaacaatcgaatacgatcatactagccataaagcgatgagtgattacactgcatacatgttagctgagatgctaaaaggtacatttaaaccatatggttctgcatatggccatggtgtatctggagtaaatatgggtgctaagacaggtactggtacttacggtgctgaaacttattcacaatataatttacctgataatgcagcgaaagacgtgtggattaacggctttacacctcaatacactatgtcagtgtggatgggcttcagtaaagttaaacaatatggtgaaaactcatttgtgggacatagccaacaagaatatccacagttcttatatgaaaatgtgatgtcaaaaatttcatctagagatggcgaagactttaaacgtcctagctcagtaagtggtagtatcccatcaatcaatgtttctggtagtcaagataacaacactacaaatcgtagtacacacggtggtagtgacacatcagcaaacagcagtggtactgcacaatcaaataacaatactagatctcaacaatctagaaacagcggtggattaacaggtatattcaactaatccactcaacataaaatcctcagttataccatatttatggtgtagctgaggatttttttaaattcatacgctattgctatattagtagaaaccgtaaaatcagtcattcacatacattttgaaacatctaaatagttttcatattcacatctttagctatgtaaaattattgatattgcaaaaatgcttgttcccatttttaaaattatgattatattttctcatagtcatcttagccattgttttaaattgatatgtttatcaattccctgtgtacgttaatcagtgaaatatcaacatgtttgcaacgtattttcacaatcatagatataagaaatccacctacgattcgaaatagatatcttaaagcatacctcaagatatccattatgatgtagatggacattttttatattaagacgttgtaatgacacgacatctaacataaatacaaatatgtgtgcatgaattagttttacatcttttcaacattaggaaatgatcaaacttgtctatacttgcttattctttaaccttgtttgataactagcattcattttaatcaattcagttttaaaggtcttcatttgtcgatagcccataaaatgatatttacgttcaatcatataatcatatctttctttaaaattcattggcacaacaggatattgatttaaattatcaaaatcaatattgccagttatgtcattaacctgcttaaaataatcaataattttactatggtattgatccaagtatggctttgcttcactagaacctaatgtcttatttttggcaaatacatcaatctcttgttctaaattatcaaatacctcttttgtaatatttgtcatgttatcacgcttctttcaaactagctttataacgtttttgtccttctctacaatcttctaatagtggacaaatatcgcatttaggttttcgggctaaacagtggtatcttccaaagaaaatgagttgatgatggctcctattccatctatctctaggtatgacagaacataaacggtcttctacctgtctcacattatctttccaacgattaatacctaagcgtttagaaacacgttctacatgcgtatcaacagctaatgaaggttcaccaaatgctacactcatgactacattagcagttttacgtcctacacctgctaaactttctaattccttatgtgtttgtggtatttctccattaaattgatcaatcaaagattgacaaagtttcttaatattcttagctttgttacgatacagaccgatagaacgaatatcattcataagttcttcatcactgactgccaaataatcttcagtcgttttgtattttttaaacagctcagttgttactctatttactagaacgtctgtacattgcgctgacaataatacagcaatagttaattcgaacggattatcatgttttaattcacattctgcatccggaaacatatttgctataacatcaatcatttctaatgcttttttcttacttaccatcaaggttctccccgtttaaccaatcaaatttaggtaccgttttaactgtgtgcgtcattttcggtttattaaatttttctcttatttttctagaatcgtcaattgttttgacattgtttttcttccaattaagtaaaatacgatccatatatttaaagctacgtttattcaaactattcgcctcgtctaatgccgcttgtataattgtagtatcgtgtttatcaacatcaatccattgatttaacgtttctatttcatatggagataacggccttgcaaatgtatcctctaaaattctaaataattgtttaaatttttctttactattttgctctttcgtttccatactttgttgcttcaatatatgacttaatttttcgaaaaaaggatctagattcatatattcagtaaatctaccttcttcatctttttgaacttgtaattctagcaattcacgttgaatcaaattttgaataaccattgtaatatcacgtggttgcatagttgagcccttctgaagtaattcaattgaaggctgtttatttgatgtttcggaagcataaatcaatttaagcaaaatgactaaatcttgctcatctaaacctaagtcactgtaatggtctaataattctcttcgtatcactacaggtcttgcttttaattgatatttatccatgttcgtgcccccttttaaatttaaccattacttaatagtataaatcattttctttaattttcgactaaaatgcttaatatatttaactagtagcaaacaaattttaaataacagtatttttttaaaactagtttttaacaatgaactttatgtataatcagatgagctatttattttccaaatatagttactaaacaaaagtttgttcatgcttaatgaaagccgttatcaatctacatttcccaagcataaatcgcccagctattaatataggctggacgattctttttattatcataatataaattttaagtaacgatcctaaaacttatggatataaacggtttaataatcttgggaatggcgcagtttcacgaacgtgttcaacaccagaaatccatgctactgtacgctctaaacctaaaccaaatccacagtgtggcacactaccataacgacgtaagtctaagtagtaactatatgcttcttcgtctaatccatgttctttaacgcgttgttctaacaattctaagtcatccacacgttcagatccacctataatttcaccgtatccttcaggtgcaattaagtctgcacataatacagtttcttcattctcaggatttggttgcatatagaaaggcttaattttagttggataattagtaataaacaccggtaaatcataatgattagcaatggcagtttcatgtggcgcaccaaaatcttcgccccattcaatatcatcaaagccttctgcttttaagaattcaattgcatcatcatatgaaattctagggaatggtgtcgcaactttttcaagttttgatgtatcacgctctaaaattttcaactctagtttacaattttctaaaactgattttactacatgtgttacatattgttcttgaatttctaaactttcagcatgatttgtgaaagccatttccccttcaatcatccagaactcgatcaagtgtctacgtgtttttgatttttcagctctgaaagttggaccaaatgaaaatacttttccgtgtgccattgccgcagcttctaagtataactgaccactttgagataaaaacgcatcttgatcaaagtatttagtatggaataattcacttgtaccttctggtgcacttgctgtcaaaattggtggatcaacctttgtaaatccatctttgctgaaaaattcatacgttgcacgaataacttcatttctaattttcattacagcatgttgttttttagaacgtaaccataaatgacggtgatccattaagaattctgtaccgtgatttttaggtgtaatcggatagtcatgcgcttctgaaataacttcaattgatttcacttgcatttcgtatcctaaatcagaacgattatcttctgtaattgtgcctgtaacatatagagatgattcttgagtaatttctttcgcaagtttgaatacctcttcaccaacttctgatttaactactacgccttgcataaagcctgttccatcacgtaattgtaaaaaggcgattttaccacttgaacgtttatttgttagccaagcaccaattgtaacgtcttggtttaaatgatctttcgcttgtttaatcgttgttttcataaccattctcctatttattttttcgttatacaatactcattcattttaacaaaatccgctttcaagttctagaactagactaaaagataacgtgtaaatggtaatgatttaagcacagatttgaacattaatttatattaagacagtgcaatcatcagtttcatacaaaatatataataaagcctcaatattattagtatgaaggtcgttttttgtgctaacattcaagtttaattataaaactcaaattttgacgaccaaacaaaaattcttgtaacagaacatagcacatgtcatgttacaagaattttattttgtatttcactttttctttttttgaatttgtcttaataattttccaaattgttgaatatcgccttttttctgacgataattttcaagtgtttgttcaaaaaagtttttataattactgtttatgagtcgatcatcaaatgaaactattatgccgcgatcattttcatttctaattaatcttccaagtccttgtctaaaacgtgtaactgcatcaggtaatacatattccttgaaagttgaagtgaattcagaatccataagccaatattttgcattatgcttgttcataaacggtaacttcgctatcatcacacatttaataccatttgcttgaaaatcaaaaccttcaaaaaatgttgacgtaccaagcagtatggccttatcaaaattattaaactgttgtactattttataattttggttctgctgttgtgttaatacaacataatcttcaaattctggcaattcatttagcatatcttgtaccatatgcatcattttataactcgtaaataagactaaacattttgatgacgttatagtcgtatattcaataatatagcttacaatcgatgctacatactcatctatatttttatattgataagatgctacatcactcggtataaatacacttgtattttttgcactttgtaacgacgtgttaacttcaaatgtattaaagtgaacatctttgttgaataactgtttaaaagcatcaaacgaatgattaaattttaaagtaccagatataaaaatgagtgatttaaatttttccaatacttgtttcgtcaatacgtcttttacagcgtaatctttcacatataaacgtattgttgatttttgagatagatttttaattgaaatgaaactagtatgtccagcttttaaactttgttcgatatttttaaatttatcttttaaatacaacaactgtttccgtaatgatttaactgttttatgactaatgccattgaatatttctagcgttttatttaacttatcgataatcgcatgtaaatccttcaaaatgtcttttgtttcaaaagtaaatacattatggaaacgatgaatatcatcatcataaacatcagaatcattgataatcgtaaatatcgttgagaacaattgctcatttaactcatgaatctcattcatactagccttcaagccaaaaatatcaattggtgcaatatctaatttttccaaaattcgctgtttttccagttgatcaattgcctttaacaatttttcattttcgtttttaccaatcaaaccaagctgatatttaatatcagcataactcaactcatttgtcacttgatttaaggcatagtctggtaagcgatgtgcttcatccactatacaatcatcaaacaattgatatattgaattttcaacatcagaatgaattaaatgtgcatgatttgtaataccaatttgaatgttctgtgcatttcgcttaataaaattataataatgaacatcgtgacgtgccggtacatatgtttcaattttctggtcaaaatacatcttttgaccaccttttaaatttaattcctgtatatctccggacggcgtctctgtaatccaaatcagcaattgcattttcaagatattcacttcgtaattacttgtgtcatcttttaaaatttgactaataagtcccaatgaaatgtaatcacttttacttttaatcaatagtgcattaattttaaaattcaacgcttcattcattgctggaatatctttttctaacaattgactttgcagtaatttagtattggtagaaatcatgacatgcttcccagtttcaatattatacatcaaggccgcaagtaaatatgctaatgatttaccactgcctagtgatgcctcaatcattgctttttcactatgcatgagctgatctaatatagtttccgctaaatataattgctgcggtcgatatgttaagccaagttgatctacagctttgctatataaagacttcaagctgccattataatttgttgtcggctttttaaaatcaacttgcttacgatagataatctgttcgaacttttcgtacgatttatccaatggctttgcatcatattgcctaaccatctcaaagaaaatatcatacaaatcgtatttcaactgtttacttaaataatataattgctttaaagtatctaacggtaacttttcaaatttttcaaaagctaatatcatcaatttagcagtagtagcggcatcttcgtcagctcgatgggcatttgctaaggtaataccatgtgcctccgctaattcacttaattgatagcttttatctgtaggaaaagctattttaaagatttctagtgtatctataacttttttgggacgatattgaatattacaatctttaaatgcctttttaataaaatttaaatcaaaatctacattatgagcgacaaaaatgcaatcttttatcttatcgtagatttcttgtgcaacttgattaaaatatggcgcttgttgtagcatattttcttcaatggatgttaacgcttgaatgaatggcggaatctctaaatttgttctaatcatagaatgatatgtatcaataatttggttattgcgcacaaacgttataccaatttgaatgatatcgtcaaaatctaattggttgcctgttgtttctaaatccacaacggcataggttgccatacccatagctatctctccttgctttagtgttaaaaatctatatctgcactaattaaacggtgtgattcacccgcttcatctctaacaattagatagccatcgtaatctaaatcaattgcttgtcctttaaactgtttatcattttctgtaaatagcaacgttctattccaaatattagaagctgcaatatattcttcacgaatttcagaaaaaggtaacgttaaaaattgattatatcttttttcaatttcttgaagtaatctctctaaaaattgatatctatctaatttatttttatcatgtaattgtatacttgttgctctatgtctgatactttcatcaaagtcttctagttgttgtgtcaaattaatacctataccacatattattgcttctataccatcattattagcaaccatttcagttaagaaaccacacactttaccattatcaatatatatatcattcggccatttcactttgacttcatcttgactaaaatgttgaatcgcatctcttatccctaatgcaataaataaattaaatttagatatcattgagaatgcaacgttaggtcttaacacgacagacatccaaagtccttgcccttttgaagaactccaatgtctattaaatcgcccacgacctttcgtttgttcatcactcaagataaaaaatgaagattgatttccaacaagtgactttttcgcagcaagttgtgtagaatctattgaatcgtaaacttcactaaaatcaaacaaagcagaactttttgtatattggtctattataccttgataccaaatatctgggagctgttgtaataaatgtcctttatgatttactgaatctattttacatccctctaactttaattggtcaatcactttttttactgcagtgcgcgatatattaagtgattccgcaatgctttgtccagatatataattcggtttatttttatagagtaattgaagtacatcttgactatattttgacatgattatccacccatttcaaaatttcagtttcttcgttgcttactttacctgttacaatcgctatctcaatttgtcttagcacatcttttaaccacggaccacttttggcatttaaatgtgccataagtacacccccattaaccatcatgtcttttctattatgcataggtaaatgttgtaatgtttcatcaatcgtttgaaggttaacgattaatggttcatgtccttgaatatcatttgcctttaacacgtctgctgcaaccattacatttttaatgagattcgtatcataatcataaacaaacatttttaattgttcttttgtaataatacttgataatgcattcataatttgaatatattgattgatatcttttgcttgtcggttacttagctttaaaggctttaatgagtaattaatatcaaatttaactgacactatagcaatcaacaattctaaatcaattggttcagtcacattaatttgattcatatcaagatgttcgaaatatggcatataattaaatgctttcagcgattttaaatgattaaaactctcttcaacattaatacctcgcattaatttagttagttcaatcactatacgctcaatcgataaaaatttaatatctgccatttgtgtacacatcgcttcaaatgtttccgttgcaatatcaaatgataattgtgactggaatcttaaacatcgaatcatacgtaaagcatcttcttggaatcgttcctcagctatacctacagttcttattattcgattattaatatcttgttgaccatcaaaataatcatacaatttgtatgctgtatccattgctatcgcattcatcgtaaaatctcttcgttgcaaatcttcgtataaatcacgaacaaatgtaacaccacttggtctacggtgatcgacataatcttcttcagcccggaatgttgtcacttcataattttcatcatcaaaaactacatttatggtgccatgttctttacctacaggtatcgtatgactaaagatagattctatttcatctggcgttgcacttgttgtgatatctatatcatgaatatttcttcccataacataatctcttacagagccacctacataatatgcttcaaaaccattgtcttgaatttgttctaatataggccttgcctgttcaaataatgatttatccatattattactcgcctttacttttgttatgctcatttagcattttttgataataatactcatattgatctgtaatgagttctgatccaaaacgttcagcaatatctgctagcatgtttttctgaagtttgttgtataacaccttatcttcaagtaatcggatagcatagtcactcgctgaatcactatcacccacatctacgacaaatccagtttcaccatgtttaataacctctttaattccaccggcatttgaaccaattggaacgacgcctgttttcatagcctcaagtaaagttagtccaaagctttctttttcacttaataataatactaagtcagataattggtaaaattcacttacacaatcttgtttccctaaaaataaaacatcctcttctacgtttaactctttcgtcatttgacgcattggcactaattcaggaccatctccaagtaaaattaatttactaggtatcttttcacgtacttttgcaaatgtttctataatagtatctatgcgttttacttgtctaaaattcgatacatgtattaacactttttcatctggtgctataccaaattgtgattttaatgctgtgttatgtttagttggaaactcattttcacgtacaaaattataaatcggtataatttctttgttagtttcaataatttcatgtgtttcttgcgctaaagatttactcacacttgtcacaatatcacttttttcaatgccaaatttaattgcaccttggagtgaatgatcatagcccaaaacagtaatatcagtaccgtgtaacgttgtcataatttttatatctttacctgacatctcacgagctaaaatcccacaaattgcatgaggtacagcatagtgcatatgcaacaaatcaagatcatattctttaataacttcagcgattttagtacttaacgtaatatcatacggtggatattgaaatactgcatattgattcacttcaacttgatgaaaaatcatattcagtaatggttttcttattctaaacgggatatttgaagtgataaaatgtacttcgtgacctcgctctgctaatttaattcctaattctgtggcaataattccagaaccacccatggacgggtaacatgttatacctatcttcattcgcttgcccatcctttctttctatttctctttctattattctcgatgcgtagataattgtttaaatttaagtttatagtaatgttgagtttataatttcaaatatctaaaaaacaggtgttgtatatataatcatttatctagttatacttactttaaaaataatatgatttcatgcgatgcaattcattggtctatgattttaatcttaatcaaatccaaataaagcaaatatttttatattcactttctttcgaatcgatttttatctcttgtattaaacttttccattgtttcattaaagctctctgtcatatctattcccattgaattcgccaaacataacaacacaaataaattatcacctaattctgctttaatcgtatttgcttcctctgaatctttcttctttttttcaccatatgtatgatttatttcacgtgcaagttcgcccacttcttcagtcaatctagctaagttagctaatggtgaaaaatatcctgttttaaattgtccaatatattcatcaacttcacgttgcatttctaccattgatttcatttctacgttctccttatattgcatttctaatatagtatatatcaatttgaagtctcatgcatgtttagtgcaatttactgactctagctaaactagatgacaaattgtttattttagtagtttaataattcagtttatataaatgtaatgcattcctaactaaattaaatcaattgaaattgggattataactttatgattcgtaccactacaataaaataatatagtgaataatcaaccattagaaaaataagcacaaaaaaactagcaatcacacaaaatgtgataagctagttaataagtgtctaatttaagttaattgttaatctataagattaatcacttgaacgcgcaagcaagataatacgtacaagctctgctacagcgacagcagttgctgcaacataagtcattgctgctgcagataatactttacgcgcatgtttgtattccttttcatttacaatgttcaatgccgtaatttgtttcatcgctcttgaactcgcatcaaactcaactggtaacgtaacaattgagaataataccgctaatgacattaaaccagcaccaatccataaagcagttgaaccaaatgcactacctatcgctgttaagataatacctaacatgatgatcatataacttaatgaactccctaggtttgcaacaggtactaatgctgctctgaatcttaagaaccaatatccttggtgatcttgaatggcatgaccaacttcgtgggctgcaattgcagttccagcaactgatggtctgtcatagtttgcaggagatagtgaaacaactttctttttaggatcgtaatgatctgttaagaatccttcacctttaacaacttcgacatcataaataccgtttgcatgtaaaatttctaatgcaacttcacgacccgttttaccactagttgatctaacttgtgaatatttctcatagttagatttaactttgtgttgtgcccataaaggaagcaccattaatattacgaaataaattatcatagtaaaaattgaagacaataaactcactctcctttataaatattttactgtcatttgcagtttttatcaaatcatttacactttaataatttgtttaattcaatataaagcaaaagtccaaaaacactcagacaacatgataatacaccaatttgccacacatgtgtagttataaaatcataatatggaaattgaaggtgaaaatagtcaatataatcattcaaaaatacccaagtcatcgctacaatgattccaatcatagaacgtttaaacctaggatagaagtaaattgcctgaacagccattatactgtgggaaaacattaataccaggccatttactgtaatatccccttgttcaataataaataatatattcataataactgcccatatcccatatttgaataatgttacaaatgccagtgcatcgataatactattttgttttcggattaatatcaatgagatagaaataactaagaataatattgcagttgggctatctggaacaaaaatcttaaactgccacggcgtatgacttaattgttcaccctaccatatataaccataaatcatccctaatatattacaaatgaggagcatcattaaccaagaacgttgataaagtgtatattgccaaagtgtattaatcgtcatctgctaagtcctcaaattgattatgtttatttactagcttgagtgtatttaaaatttgcgttagttgataaaaacgttgcttttcattcatctgtaaacttaaatcaatattatgtagcaagtaatctattaataacgcatgtttatgccgatctatagccatactatttaaatcatgaagataagtttgatagctaggcgattccgttagttgagcaactattaaatcatctagcctttgctcacgctttgacacgtttgcgaagtgaatttgaatatcaaaagcacagttatgattagcgatataatcaaatatttcatttgtattcattaactttatattacgcttagtaaattgaattgcagaagcgtgacttcccacttctgcaatttctaatgtttcatgatgattaatttttgtatctacaaaatgaatgtttgccaacttcgcctcattcacttttatatagttaagcacccaaactgcaatacgcgacttaaatcgatattgaaaaagtaaatattcaataaaactttctttaatttgattgagtgtctctgacatcaaataccccattttaagattgcaatcttgataattcgtcatgccaattttcgttacttggttctagttccaacaattgatttaaaatagtaattgcttgttccttttgaccagtttcaattaaatagaaataataatcactcataaaatcaatatttgttttcatcgttggatatgctaattcaaagaaatgttgagcttctttatctcgctcttcctgaccataggcaaacgctaaatgccacatgaatgtaggatccaaatcttcttcatctacatatgttaataattcaatgattgcttcataatcttcttcattacgatataaatcgcttaaaatcaataaaggttcttggtaagcattatcaacctctaatgcttgttttaacaataatacaccttcattagcatcgccgtgttctatttccaaacatccagttgtatacattaactctttataaaattgacttagtcgtaatccttctttacccgtttcaatggcatctggataatttttttcattttcatataatgattgtaaatacaagtagccttgaatataatcaggatctttagaaagtaatgtagtcattattttaattgcttcttgagtgatgtcatttttatcgtaagaaatggcttttttaagataatcttctgaagtcatttcatcttcattaatttcatcgtataagcgaatcgcatcactatagttaccactttgtaaactacaatctgccatacgagagaataagtttacaccattaacttgatattcaccagtttctaaaacagtttcgtattcagaggtagcacgtaaatattgaccatcataatataacatttcagccaatgcgaaatggattattggatcatttggctctagttcaagtgcttcttgtaatttatcaatagcaacttccatcatattaatttgttgatataaatctgcttctaacatcaacttttcaggtgatggttcaacataacttaaatattctaacgcttcgtcagtttgattttcagacattaaaccttcaataaaataaatcagcaattcactttcgtctggatatttgtgatataacacgcggaatacttctaaaccttgtggcattaatccaaaattgtaaagtgtctctcctagaataaataatgcgtcatcgttgtcagtagttattgcttcattaacacgagagtctaaattttctagtttttgtagattgatatcgtctattaatttatagatatcttccattttatattatccctcattttctaaaagctttagttttggtaaaaatcctggaaatgatacatttacagcatcaaattgtttaattttgacaggttcgcttgaaagtagagaagcaactgcaagcatcatccctattcgatgatccgttaaactatccactgttgcatttgttttaaattctgacggatgaataatcaatccatcattagttggttgtaattcaaaccctaacaagtttaacatatcagccgttgtatcaattctatttgtttcttttacttttaattcctcggcatctttaattgtactcgtgccaactgcttgtgtacaaagtaatgctatcactggcagttcatcaattgcttttggcactaattctccttcgattgttattggttgaagcattggtgtgtattgaatacgaatagaagcagtaggttcagcaccagttgtttgattgaaaagttgaatattaccgcccattttttcaacaatatcaataatacctgaacgtgttggattgattccaacattatgaattgttacatcacttcctggtgtgataagtgctgcaacaataaagaacgctgcagatgaaatatcgccaggaacatgaaaatctgcaggtttaatgtatcgaattgcttcaggggttgtagtaattgataacccttctgcttcaattggaatattaaaatgtctgaacatcgtctcagtatgatttcgacttacatctaattctttaatgatggtcgcttccttagaaaatagacttgcgaataagatggcacttttcacttgtgcacttgccacttccatcttgtaattaatacctttaattacagatggtttaatgattaatggggtgtaattgtcttcaattccttcaatatttgcattcatactttttaacggtcttaaaacacgatccatcggccttttacctatggaaacatctccagacaagacactttcaatacctaaaccacttaacaaacctgccaataatcgtgttgtcgtaccagaattacctgtatacaatacttgatgtggcgtgttaaaagattgatatcctggggaagtcacaactaatttttcatcatcttctttgatttctacacctaacagtcggaaaatgtccatcgtacgacgacaatcttcgccaagtagtggcttatatatagtagatacaccttcagctagcgacgccaacatgattgcacggtgtgtcattgatttatcgcccggcacttctatttcgccctttaacggacctgaaatatcaatgatttgttcatttaccatttcattcacctacttaaaatatgtttttaattgttcacatgcatgttgtaatgttagttgatcaacatgttgtacaacgatatctccaaattgtctaatcaagaccatttgtacaccttgcttatcattctttttatcacttagcatatattggtataacgtttcaaaatccaagtcagttatcatgtctaaaggatagccgagttgtaataaatattgaatataatgattaatatcatgcttagaatcaaacaaagcattcgcaactataaattgatagataatgccaaccatcactgcatgaccatgaggtattttatgatagtattcaacagcatgcccaaatgtatgacctaaatttaaaaatttacgtacaccttgttctttttcatctgcaacaacaatatccagcttcgtttcaatacctttagcaatatatttatccataccatttaatgactgtaatatctctctatctttaaagtgctgttcgatatcttgcgtcgctgattcaccattcaataacgcatgcttataaacttctgcatagccacttaatatttgctcaaatggtaacgtctttaagaagtctaaatcataaatcacagcagttggacgataaaatgcaccgataaggtttttaccttgctttgagttaatacccactttaccgccaacactagaatcatgcgccaaaatcgttgtgggaacttgtataaaatggacacctcttaatagtgttgctgctacaaatcctgcaaaatctcctgttgcaccaccaccaacagctataatcgctgtattacgcgttacatgatgcgacaaaatgtattctaaggtttcttgatattgctcaaatgttttcgtcttttcaccagctggaataatgactttatgcacattttcatatgataaaatatcatcaaatttattcgcaaaatattgatttacatattcatcaattaacaagaaactttggtcaaattgatttaaatatgtgcctatatacttgattgcaccgtgttcaacatatattggataattgtttgaagggtatgttgtttgtaatttcatgattacacctcaattgttcttgttgttaaaactcaatatttaattgtctgcgctcaataatttgttgtttaagttgctcaatatgatttgattggaattcttccaataatgcttttgcaatttcaaatgctacgacatgttcgcagacgatacttgctgcaggaacagcacaactatcagaacgttcaattgttgctttaaagtcttctttggtattaatgtctactgaatttaatggtttatataacgttggaattggtttcattacaccattaacgataattggcattccatttgacataccgccttctaaaccacctaagtgatttgacccacgataatagcccaattcagtatcgtagagaatttcgtcttgaatttcgctaccaggcttttcagcggctttaaatccttctccaaaacttacacctttaaatgcattaatactaacgacaccctgtgctattcttccatctaatttacgatcataatgtacataactacctacaccaacaggcatattttcaactacaacttgaactacgccccctattgaatcaccatcgtttttcgcttcatcaattttatcgcgcattgcttgtgcgatgccatcatcaattacacggacgtcatttcgatcaaggtttgctttaaatgtttctgaatcataaaaatctttatctttaatgccacctatctcaacaacacgactgtatatttcgatatctaattgttctaataaaactttgcatagtgcaccgaccgctacacgtgctgctgtttctctggcagatgaacgttctaatacatttcgtaagtcacgatgattatatttcataccgccaactaaatctgcatgtcccggtcttggcttcgtaattgtacgtttcatattttctcgttcttcgtcgcttattggcgcagcgcccataatttttcgccaatgtgtaaaatcatcattagtaacaaccattgtaatagggctacctaatgtataaccatttcttacacccgaaacaatctccactgtatctttttcgatttgcatacgacgtccacgtccgtaaccgccttgacgcttaaacatttctttattaatatcctcaaccttaatttctaaatttgcaggtacaccttcaacaataactgttaattgaggtccatgtgattctcctgatgttaggtatctcatacacactcgctcctttcatacttccacgataacattataatatgttgttaatcttatcatattcattgtgcattcataaatgtttgttttcaagctcaattaagaaattgatttatatctctttttaaatgtcagaattatcttaatattaaacgaactaagattcattataatatattcacaacgagaaaagtattatgaatttctaatattgttagattgtttaaacaaccatttgaaaatttaaaatttattcgaacaacttataccgcatataatcgtagctaaccactaataaataatatacaagctatatttctttatataaaagtaaatggactgatcattttttataaagttaatcagtccgtataaaaatagggctttgttatgaatgatcataaatcactaaccacataacaaaaccctttttccttttataaatcagaaaggtttatagcttatattttattcgtataaccaagcatcacgtggtgaagcatagctagtaatttcattttcattaaaccataaattaatttcacgttcagcagactctaatgaatctgaaccgtgaatgatatttctaccaacagttaaacctaaatcacctctaattgatcctggtgaagcttctgaaggattggtgctgccaataatatgtctagatacattaactgcatcttcaccttcaactaccattgcgaacactggtgctgatgtaataaatgaaattaaatcattataaaatggtttaccttggtgttcaccataatgtgtttcagcaagttccattggtacttgcattaatttaccaccgacaagttttagtccttttctttcaattcttgaaattacttcaccaattagatttctttgtactgcatctggtttaatcattaaaaatgtacgttccactttatgtatccccctgtgtttaataggtttatgtatattactattatatattaacaggttggtaaagcgctttcaatacttttcataaatactatgtgtttcttgaccccatttttttcgtcaaacttaaaagtagtgatttcggatgtccatctggtaactcagaaatcaaatccaaagctttacttaaatacttcgaacttactgccttagcttcatcgatgctgtcagattttctaatgatttggatacaatcttcaaattctttgcgatcactatcacgacgtaactgttcgattttcaatttgaagtctggatttttacgcatttctaataaaatcggtaacgtaatatgaccattaagcaaatcacttccgaccggcttacctaatttcttttcagtacttgtgaagtctaatacatcatcaatgatttggaagctcatgcctatataatgaccaatcattttcaattttcgtacagtctctttatcagattgagatgtaattgcaccaacttcagttgataattgaattaacagtgctgttttacgattgatacgtcgtaaataattgataattgtctgttgactgttaaattggtcttgaaattggaaaagttcacctctacaaacatcaacgatagattcagatattaattgatgtacacgattatctttaacggccattaagtgttcaagtcctaatgccaataaaaaattcccagttaaaatagcagttgtctgatcccatttctttgatatggttaacttgcctcgacgcttgtcgcttttatcaataacgtcatcatgaacaagtgttgccatatgaattaactctaatgcgactgcaacttgatacgtttgttcagacgtttgttcatctttgccaaattggctactcagaattacaaatgctgggcgtactcttttaccaccagaagacaataagtgtaatgatgcctgttctaatacagaatctttactttttattgccttttcaagtcgttgttccactttcttaatttcattgttcatgtttaactttgccacgttaatcacctttggtattatctttttctttatagccaaggtgcattgcagcaacgccccctgtaaaactacgtactcttacatttatgaaacccgcttcttcaaacatgcgcttcaactcttcttttccaggaaaattaaacgtagattgctgtaaccattcatattcttcttttgattttgcaaataattttccaaaaataggcataacaaatttaaagtataatgcatacatttgtttaaagactggcaaagttggttggctcgtttcaagacataccaccataccacctggtttaagtactctattcatttcttttaacgcgactaaatagtctggcacatttcttaatccaaacccaattgttacataatcaaaagaattgtcttcaaacggcaattccattgcatcaccatgaacaagtttaacattttccattgaagcagttttttcttttcctacttctaacatattctcactaaagtcaataccagtaacttcacctgttggtcctacagctttgcttaatgcgattgtccaatcaccagtaccacagcaaacatctaatgctttcgtaccttttctaacacccatgtctttcatgacacgttttctccatactttatgctgctcaaaactaataatattatttaatctgtcatatttttttgaaatattttgaaaaacgcgatgtacttgctctttatttgctttattgtcagccatgcttaattacctctactttttaaataacttttttggatatcgtgtaagtaatgctttacttcactttgattatatttcttgaagtatgatggatagtaatcagatatatcttcaaataaataattatatatttccgactcatcaatattgataccgaaatgagataacgtaatatatgggaaaagtgtctcaatttttactattgcttgagaaattttataatcatttaaagcttgatgatgtaatgaagatttcaattcattaatttcaacaattgctttactaatttcattttgaaatgataaatcattgatttctgctagtagcgtataaaaatgtgcactaattaaatctccaatcaaaatggaatgcttagacaaatgattatatgtaatgtcatcaaggtgtctcattgatgtgtcaattgtgaggcatgctactttggcaacatctggaatatcatatgaatcgagtaacttacctaaccgatgattaatattaatggattcatattctgatacgccctttaatctttcttctatttgtctttccaatttgctaacagttgtttccatgtctacacctcacgatattatcactattcatattaacattatatgtaagaaattaaaatcttttgaagcattaagattacttatcatttttaaatttcaatttaaactaacagtaatttatgtagcttttgtaattctcataataacccttacttcatttacattattcatcattttaaataacgtaaaatactatagtagacatggttaccttttaagtaaattcaacgctaacaattaatctcattattcatatgtatattttgtagttgctatttttatcaaaactattatgtcatgtaatattttgaacgcttaaacaatgaatgttccaaagattaaaaacttagaagaacattacaatttatgtacaggttgtaagtattaaaagcaaaataaaaagcccttattcagggctttttaagtaaaattattttacagcatcttttaatgctttaccagctttgaatgctggaactttacttgctgggatatcaatttctttaccagtttgagggttacgacctttacgtgcagcacgttcacgtacctcaaagttaccgaaaccaattaattgtactttttcacctttagcaagtgagttttggattgattcgaatacagcatctactgctgaaccagcttcttttttagttaaatcagcttgctctgcaactgcattgattaaatctgttttgttcattagacattcacctcctgaggtttgataatgatatgtttatatcattatggtaaaactttaacacaagcattacataaatcgcaatcatttatgtggcaaaaacgttgaatttaagccatttctattcattttgcgtaattattagctgtatatgtgtaataatacacattttattcagattttttatcgcgctccattaaatcttttacgcattcttttaccgaaatattttcaaataatactctatataatgcatttgtaattggcatatccacatttttttctttagctaaatgataaacggatttagttgtataaataccttcaacaaccatattcatttcagataatgcttgatccattgattcaccttgtccaagcttatatcctaatgtgaaatttcgagaatgtgttgatgtgcaagtaacgattaagtcaccgataccacctaaacctagaaatgtcataggatcggcacctaacttttcacctaatctgctaatttccgctaagccacgagtcattaatgcagcttttgcattatcaccgtagccaattccagctacgataccacttgctactgcgatgatatttttcaatgcaccaccaagttcaacaccaatcaagtcatcattcgtgtacacacgtaaataatcattcataaataaatcttgcgttaatttacttacatttttatcttttgatgaagcagcaactgtagttggttgcttgactacaacttcttccgcatgacttggcccggacaacacgccaatacctgcattatattcaggtgaaatagaatcttcaatcatttctgacacacgtttaaatgtcccattttcaatacctttagcaacatgtataaaagtctttttagatgtcagcttatcattaatttgagtagcaacttctcgcattgctttagtaggtaaagccattaagtaaatatctgcatattgaattgctttggtcatatctgaagtagcgatgatgttaacatctaatttcgcgtattttaaatactttttatttgtatgacatgtatttaattcatcaacagcatcttgatttttaccccacatcaaaacatcatgtccattttctgcaagaacattggcaagggctgtcccaaaacttcccataccaaaaacggtaattttagtcattgttatcccccaatcgttaatttctctttcgagctataatatgaattggtgtaccttcaaaaccaaaagcggcacggatttgattctctaaatagcgtttataagaaaaatgcattaattctacatcattaacaaatacaacaaatgtcggtggttctatagcaacttgtgttgcataaaagacattcaaacgtctacctttgtctgttggtgtagggttcatggaaattgcatcagtaacgacttcatttaaagttgaactttgaacacgttttttatgattttcacttgcttcattaatgtaagggaataatgtacgtaatcttgtgcgttctttagcagacacaaaagcaatttgtgcataatctaaaaattggaattctttacgtacttcatcttcaaatttcttcatcgttttactatctttttccacagtatcccatttatttacgacaatcacgactgctttaccttgttcatgtgcatatcctgcaacacgtttatcttgttcaataatgccttgttctgcatcaataaccactaaaacaacatttgaacgttcaatcgcttttaaagctcttaatactgaatatttctcagttgattcatatacttttccttttttacgcataccagcagtatcgattaaaacataatcttgtccatcataactatactctgtatcaatagcgtctctggttgtccctgcaacattagaaacgataacgcgatcttcacctaaaatagcatttactaaacttgatttacctacgtttggtcgtccaataatggatagtcgaattgtatcttcatcataaggatcttcttcctcttcaccaaaatgagaaacaactgcatctaacaagtcaccaagacctaaaccatgtgaccctgatatcggatacggttcaccaaaacctaatgaatagaaatcatacacgtctgtacgcatttccatattatctactttgttaaccgctaatacgaccggttttttagatttatataaaatttgagcgaccatttcatcgctttgtgtcaatccttcacgcacgttaaccataaaaataataacatctgcttcatctatggcgatttctgcctgcgctctaatttgtgtttggaatggtgcatcaccaatttcaataccacctgtatcaataatattgaaatcatgtgttaaccactcacctgaagaataaatacgatctcgtgttacacctggtgtatcttcaacaatcgaaacacgttctccaactattctattaaaaattgtagatttacctacattaggcctacctacaatagctactataggtttagtcataagctaacttcctctctttcttatatctttttaataatatcacatgagactgtgtattcaaaatgagtttattactgtaatgataaaaatcagcacttaaaactttatcttataaaacacttagttaaatttgtccacgttatcactccgaatatttttggttacataaaaatactccacatgcaatcataaacatgtggagttgactattaaatattaaattatagtttaagatttttaagtttatcaccaatcatatcgccaattgttggattatcttcttcttcgctttctaagtacgccttagtcgtagaaggatcactttcaacaacatcttcgtttggtaatgttgctttaatagatagtgatactctttcattctcttcatcaatacctaatattttaacatttacttgttgaccaggttctaatacttcacctggcgtaccaatgtgtttgtgtgcaatttcagaaatatgtacaagtccttgtacacctggtgcaatctcaacaaatgcaccaaagtttgccaatcttactacgacaccttcaatgacatcattttcgtggaattgacctttaatattttcgaaaggtgttggtaacgtatctttgattgataatgaaatacgttctgtatctctatcaatagatttaattttaactttaacatcttgaccaattgaaacaacttcttctggtgtttgaacatgttcgtgagaaagttcagatacatgcactaaaccatcaacaccgccaatgtctataaatgcaccaaattgagttaaacgcgctactttaccatcaataacatcgccttcatttaaagattgtaataattgatcttttttagcatcgttttcttcttgttcaactgctttacggcttaaaatgactctattattttcaggatccaattcttcaactttaatacgaattgtttgtccatcaaacacagagaaatcctcaatgaagtctgttgaaattagtgaagccggaacaaaacctctttgtcctacatcaacaaccaaaccacctttaactacttctgttactttcgcttcgatgatttcattattatctaatttttcttgtaaataactataagacttctcagtttcaagttgtcttctagataagatgtaagctccagtttcattttcttcatcaaactcaactttagtgacatatgcttcaacttcgtcgccctcttttacaacttcacttgggctatcaatatgatgcgtagatagttgactaataggaataatcccattaaatttaccaccgttgatatgaacaacaacttgcttgtcttcaacttgttgtacctcgccagtgactttgtcaccttctttaatatcgttaatcattgattcattgaattcttcagtcatcttgtttgcctccttatacactacatatttataacatcttataaactgacagaattgtcaagaaattctacctttattacatttagtaaattagttgtatccataaatatgtcacttaatctcattctgtgtattagttggacatatatttattacaaccatatattcaaacaagtaataaagtccgctatgtttatacatattttttgtataaaaattagcatagctcactattttgttttataagtctgtcatttcattgttctctacaagatatattatagtaaaattttatacttttataaaacaaaaagccacgcaaataagcaacttttacatttgaatagtaagaaaaccgtatatagtgcatctttctcgaattattacataggacattttttgtgactaaatcagcttcttttgcaatgcttagatatgtaacactcattttcttaccatttgtaaaatgctttatgaatgtaatgaattatttttggaattctaataatttacctttattatttctgtttactttttaaaaaacttacacaattgactgacgcattaacttttaccaaaaataaaaaggcaactttcattcatcgttgaataaaaatcaccttttaatttgagtaaatcattatcagcacattcattttgtatttgcgttaagcgttgcacattacaaatagatagttatgacttactagattatttaatttgactcaccatcgctaaaatttcgtcagtaacttcttcaatcgacttgcctgtcgtatctaatgtcactgcatcatctgcttttcttaatggtgatatttcacggttcatgtcatattgatcacgtgcttcaatatcacgttttaaatcttcaaaatttgattcgatacctcttaattgattatctttatatcttctttctgctcgctcttcaactgatgcaatcatatatacttttaaatctgcatctggtagcactacagttccgatatcgcgaccatccattacgatacctttttctgcagctaactctttttgttttttaacggcgaatgaacgtactggctctttagatgcaacgtatgaaacatgttgcgtcacatcattatttcttaaaaagtctgttacatcttcgttatctaaaatgacacattgacctttatctgctttataagttaaatctaatgttgtttggtcaactagttttgcaaagtcctcagttttgtttaattttaaatatttgtatgttaatgcacgatacattgctcctgtatcgacataaatcattgatagttcactggctacacgtttcgcaattgtactttttccggcagcagctggaccatctaatgcaatattaatggctttcatgcgtcatttcccttccttgtcgttttatgaataatattttatcataattaggtaaatgaaatataggaggaaatatatgaaacatctacttgttattcatactggtggcaccattagtatgtcacaagaccaatctaataaagtagtaacaaatgatatcaaccctatttcaatgcatcaagatgtcataaatcaatatgcacaaatagatgaattaaatccttttaatgtaccatcacctcatatgacaatccaacatgttaaacaattaaaggatattattttagaagcagtaacaaataaatattatgatggtttcgttatcacgcatggtaccgatacgttagaagaaactgcctttttacttgatttaatattaggtatcgagcaacctgttgttattactggcgcaatgcgctcgtctaatgaaattggttctgacggattatataattatatttccgctattcgcgtagcctctgatgaaaaggcccgtcataaaggcgtgatggttgtatttaatgatgaaatacatacggcgcgtaatgttaccaaaacacatacgtctaatacaaacacatttcaaagtccaaatcatggtccgctaggtgtattgacaaaggatcgtgtgcaattccatcatatgccatatcgccaacaagcattgaaaaatgtcaatgagaaactaaatgtaccattagtaaaagcatatatgggtatgccaggtgacatttttagtttttatagtcgtgaaggtatcgatggtatggttattgaagcgttaggacaaggcaacatacctccaaacgcattagaaggcattcaacaattagtatctttaaatatacctattgtgctagtttcacgttcctttaatggtattgtgagtccaacttacgcatacgatggtggtggttaccaactcgcacaacaaggttttattttttctaacggtttgaatggtccaaaagcaagattaaaattattagtcgcgttaagcaataatttagataaagctgaaatcaaagcatattttgaataataatgattacgtaacataaaaaggtctatgtacaataattagtcatcaacctcatttgacatatcatgaatgtcagtcgttgtaaaactaagttatttagtacatagacctttatttttatgattctaacggcgtttgtttcttagctagcatgctttgagcaataatgccaccgtggaatttaccattttcaataaaaatggtattcgcatcgttccctgcagcaatcacacctgcaatgtagcaattttcgatatttgtttcgtatgtttctttattatacataggcgctgttccaaattcatttgtattaatttgaatgcctacagattttaaaaattcataatcgggatgataaccaatcatcgcaaatacataatcattgtgtatcgttttactttcaccatttacttcataagtcacagtatcttcagttatttgggtaacatttgcattaaattccatgtcaattttttcatgatttactaatgctgtgaaatttggaagtatccacggtttaattgaaggcgaataatctccaccacgatatagaaccgtcacgttagcaccagctttttccaactctaaagcagcatcgatagccgaattcttaccaccaataataacaacatcttgatcaaaatacggatgtgcctctttaaaataatggaacactttaggtaaatccgcaccttcaacttctaatgtattatgctgaccataatagcctgtcgcgattgttaaaaatcgacattcataaacatctttcgtcgtagtaattgtaaatttattattcatttttttaacagttaatacttcttcaaatgcatttacttttaattgatgatgttttacaacttctcggtaataaactagcgcttgattacgtcttggtttactttcttcaacgataaacggtacgtccccaatacttaatttatcacttgatgagaaaaatgtttggtgagtaggataattgtagattgattcaacgacattacccttttcaataattaaggtatcaataccttttcttttttgttcaatagccgcacttaatccgcatggccctccaccaattatgatactttcaactttttgcattgtttcggcctcctttaatcccaaactattataacagttcagtgattgatgcgctaagtctgtgcttgaagatttatgatatatttttgacaatttgtttaatgtgcatagagaattgttacctgcggagttgaatagcactacaatttaatatgttgatttattttttattctttctcgttaaatttgatgattgtggtgttttatctttttgatgactatgtaaaaagttaaattgatatgtcaatattcgagacaacaccttgttaaataacaaactttgaaaatgaaaaaactgctacatacttataagcgcaatttaagttctctaaaatatttagagatactttataatatgcacgtttgtatatagcagttcagttacaatttatatagttatattatggaataacgatttgttgaccgtttctaatattgttaccacttaaaccattggcacgtctaattttttcaacattttccggtgaacctgaaccgtagtattgaattgcgatacggtataagttttcttgaccattcactgtatgtctttggccaccaccttgacgttgttgttgctgttgttgattttgattagcttgttgttgattttgattattttgtgcttgattgttcgcttgattagcgttgttttgatcattatcagattcatctttagtcgctttgtcttgatcatcttttgatttatcactgtctgtagattttgttttatctttagaagcgtctttagatgtgtctttatctttactttcatcagcattatttttatttgtattcgcgattttattttcttttgtaccattattatgattgtttaatgccatgcctccaaatatcgctaatgcaccgataattagtacagctgcaattaatggtaacaatactttggccatgccaccttttttacgttctttatctctgtcatgatggtcatgttcatcatggttttgacttgcattgttagaggcatgtggttttgaagcggcagaagcacttttacttgctgcgcctccagccaaacctgctgttccagcaccgattgctgcaccttttttaccattatgatgatctttagacttatcttgagacactttatcctcagtcgagttattcgccttgccagaattacttttgttttgagcgtcatttgaatgtttcttagctttagaagcagccattgcaccagctgcacctgcgacacctgctgttccagcaccaattgctgcgccttttttaccactatgatgatctttagattcatctttgtcttgcttaacggttacatcatcatgtttatcttttgatgtatttgcttggttagcacctgttgcaaaatatggtttaggttgctgagattgttcagcttcactcttatcagaaactgttgaatgctcagtgttattttctacatctttaacagtctcgtgtttatcattgtcttcgattggttctggatgtgatttatccattgcaaaagcattcttattataatattcctcttcatgttgaggtgtactgtcttgatggctaggttcttgatttacagaactatgcgctgatgattcgacttgacgatcatctaatgtgccagcctcattgtgagcattgtcgtcagatgcttgtgattcatcgtgatgttgtttgttatgatttgttgctaaatcacggcgtctttttcttctttgggcatttcttggtgggaactgttgctccgtattctctgttgtatcttgatgttctaattctgattggtctttttcgacatcttccgtatggtcttgatgtgaatttgtgtctatcgattgacgatttttttcaaagtcatctttaaaattattagacatagccatcttcctttctattctattacaatgattttacataaaatatacccgtatgacacaagtttatgtatatttttcaaaattatttcaatcatttttcaattgtgtatacactaattatagcttgtcaattttcttttagtaaagtaatactatctgagaaataaattttgcaacttttcatcaaacccaatacttctaattacctttttcttatttaaaattacgatatcagttatattagaatcattgtcacaacatcgatcttgtgccggtggatattcaccgaaaaattctaataaatacttccgtctacattgatccaatttgcaatagccaatcatgcgaaagaatcctaattgctttcgtttaaatgattgcttaaatatctgtttcaaggcgccgatactatagaatgaatgcaacgttgtcaaaacgtcttgtttatcgggtgctaaaaattctcctatttcgaaattttgtacatcttcttctgttatcatatctgcaaataataacgtttctaaaatatatttatcgtccggttggaataaactaattgcctgacttagttcaccatcgcgacctgcacggccaatttcttgaatgtagttagaaggacttgttgaaagatgaaagtgaatgattgtgcgaatatcttttttattaattcccataccaaaagcactcgttgcgactataatcggtatatcattatttaaaaattgttgttgaactgtgtgtcgctcttgataattcatatcaccatgataaatgcctgtaagaaaacctgaatcataaataagttgcgctaaattcagacacatctttttcgatgagacataaataatcgttggtcccgactgttgtagaaacggcagtagccactcaattttatcctcatcatcatgaaaattaagatgcttaaagcttatgtttgggcgattcattgtagttttaataacgttgaattgaaccgctaacatttccgtcaaatcatcttgcaaatgtggtggtgcagttgctgtcaacgccaagacaactgcgtccttaaaatgcttagttaccttacctattagcgcgtaatgtggtctgaagtcgtagccccattcagataaacaatgtgcttcatctagtacaatcatgccaaagtctatcgtggaaattaatttaaaatttgccggttgtaggagaaattctggacttagaaagatgaagcggctatgtcgtaaacatttaatattatgctttttctcaatttcatccataccagagtggatacatgttacacgtttttctccatttattttcaactgcataacttggtcatccattaaagatattaacggtgagataattaatgtcggcttacctgataaataagtaggtatttgataacacaaactctttccacttccagttggaagaatacctagagtgtgttgttgagacattatactttctataatttcctgttgtcccggtttaaaactctcgaaaccaaatttgtttcgtaaaatatcatgcaacattcagatcacctctttcaaatccaacgattaatacttttaattgaaaatatgataacgtgtcaaattgttctttgtaaaattttaatcgttcgccacgatgctgttgataaaaattcaaaaattgcagttgatcttcttgttcaacataatcatcgtaattagacatgtaacctttgattaagatttcaagtacatgatcttcgatagtattgattttaacttgttgttgagccgctatatcttccatcgtgaattgttcaagcaatcttgtataagtaatataggtttgatttaataatgtaggtttcattattatttttgataaaatagtatattctccgctttctaattcaaacatcattgtcactaaattattcatttcgaattcaaacaattgctgttgagatagtttttctattaaactaacttgctgtctcgtatacattggttcatcatagccttgcaaataataatgtaagtaacatggcccttttaaagttattgctttaaacaagttatgtagttcattttcaaaatcaatttgtaattggttttctttaatgtagttatagacaatctttacagtttcttgtatcttattattttgagagattggtacaaaatgaaaaacatgttgtttggtattagacatggtttgcactaatagttgaattgcttgaaatgtttgccccatactttcaaatgtatatctaggatgcaacatgatttccatttcagcattaaattcagttatattttctaaaaatagctcaaaagacggatattttaatagtggtaaactgtgatataatgacaactgttgttgactacaagcgtcaaaaaaggtttggtgagatttcttaccaactaagatattgtaaatacttttatttgttttatagttaaatgtttgttgtaatgctgtttttataatgtgttgcaagtttaaccctcactctgtaaaacggataatttgaaaataaaaatgatgctgtctaaaattttagtcacattactattttagcatttttatcaaaggaggcgaagacattggcaaaatatacaatcgttgatatggatacttgtattgcatgtggtgcatgcggtgcagcagcgccagatatatatgattacgacgacgaaggtattgctttcgtaatccttgacgataaccaaggtactgcagaagtacctgaggaattatatgaagatatggaagatgcaattgatggatgccctacagattctattaaaattgcagacgaatcatttgatggggacgctttaaaatttgaataattgattttttagacaaatgttccatagaaaaagcaggcaagctatcgtttattgatagtcacctgctttttattattatgtgtatattattttgctttaatttgattaaattcttttcaagaaattcgcaagccttctatatagtaaaataaatacaatagaaatgacgatacctttaataatattgaatggtataattcctgaaacaatgattactttaagattatttgcgatatcagctaagttaaatatcataccgtacaaaggtaatagaacgaaatagttcaagatactcaacacgatagtcataacgattgtcgcaatgattaatccagtaatcaaagattttgttgaacgtttatttttatagatggcgtaagcagttaataagaaacttgcgcctgctaaaaagttagcaaatggtccaactggatcgcccatactaaataagtagttcaataaatttttaaccagtgcaactatgataccggcaactggtccaaacgtaaatgtagctagtagtgacggtacatcactaaaatctaaagttaagtatggtggcaaaaatggtataggaaacttgataaaagttaacacaaacgcaatcgcgctcaacatacttattgtgataagacgtttattttgttgcatattcaattttctccttccattcatctcgtaagaataggaggattattgcacaacaaaaaacctccatcttctcccatccagactatactgtcggctctagaatctcactagatcagccactaatatgatacatactagcaggtcgcaggctttatttactgccggttgggaattacacccgaccccgaagatgaattttacattattaaatttaattctcattaattttatactatataccacaaaacctcaataactatgctttaattagatcatagttacgtaattggagaatgtttcattggtgatttacgtactttggttggaatgttgtttgtttgattgttttttgagatggattttgggacggttttttgattctatcactcaattgggtcaagatcgtcataaaatggaaagcaaattataagaatctagtaggttaaaaagttttatatcagcacttccatatatattattatttaaatcgccagaagttatacttaaaaccttctacttatttgccttcacaacaatagtagaattgtctttcaatacttaatctagccaatatacactaatctccgctaaatattcatcatttattttattcttagtcaaacacaccatattctgaagtgcttttaccgttataatttggtttaactgtatttatttttttgtccgaaaattttatactaagatctataccgtttggtatctctttttctttttttatttcttctgccatttttattacattttcactgttactttttttagtatagttctttttttactaaatagagtagtagttaccgaaactttagacttatcttttaattgcttcttaacatttgacaattcttttgaaaattcactgtcacttttgtttaataatggtacaaaatagtctctatactcagttaaattatacggtatagtcgtaatataaaaatattcattttcatagccactattttgtgtcttgttaattgcctcttttgtaaatcctgtatattgatatttcttttcattatctttgaaaaatttatataaattgtcatacttttctttttgtgctcgatattcaaagccactcaacactgtaccaactaaagtactcatatcatcgcctttgtcctcactacttaatgagctattactgtcaataattgatttgtcaaatggaatactcgcattaaatacgatgtcgtggtcatcacaatgcacgaatacttctacgccgtcgccactacctacaacattggtagctttaacttttagaccaaagttatccataaaaaattgttcgcctcgtttagcaattttatctttatgcttcttcacaaattcaatcgcatctttttctgcaggcggttggaagccttgtcctacatattttgaagcttccatttcttctggcactgattttgtttctgtattcgtgtctttacttgattcattttccatcgtggaacatccccctaaaattaatgtcgtagctaaaactgatccaatgaattttttcatatgacacctcgaataatttaattattacaatatatctatattttaccctatttttataatcaaataaataactttatcaaactttatatttttatataaattagtaatatatttaatagttgatattcgcaaaaaccctaaatcctaatccacatacaaaattccccacatcaataaaaaaacgcatgctataaattagagtctctaattaataacatgcgttcttaaataactatattcagttttattccggctttggtagtttgataataaacgttgtgccttttcctaattcgcttttaacatcaatggaaccaccatgctcttcgataatcattttacaaatgaacaaacctaaaccagtaccttgtttacctcgcgttctcgctgcatcaactttataaaaacggtcaaatacttgttgtaaatgttctggtgcaatgcctgtacctgtatctttaatgtataaaatatcttcgctttcattttcagcacaagtaattgcaatttcatccccaggtttcgtataacgtgatgcattatcaattaagttcgttagtacttggtccatgcgatccatatcataactccaaacacgcttcttacaataattaaaagtcatatttagacctaaatcatcagcttgttggcggtacttaattttcatcttatctagtaacgctgcaataggctgaacttctttatttacggataacccttcagcatccatgcgagcgacatttaacaattcattaactaaacgatttaaacgtttcgattcatcaaggacaatggcaagcgattcttttatttcatccggttctgtaacaataccatctacaattgattcagtataaccttgaagtaatgatatcggtgtacgtaattcatgtgatacattagcaatgaaatctttcttcatttgatctagattgtgctcattagtcatatcacgaactgtcacaacaacaccacttttacctccctgttcaatcttatcgatatagcttgtggtcacaacaaagaatcgtgcattcatttctaaatcacgcatttccgtttgttttgatttaaaagtatcttcaatttgtcttaataagaaagctttagcatcttcatcaatattgtccataatatcattcgccatcttattcgataagataatttgtcgactctcattaatacctaggacaccttctaccatagagttaattaagctgtctctaatatttttagatgtggataatgcgtcgacatgctcttcgatttctgtactcatctgattaaatgcctgtgataattgaccaatttcatctttcgttgtgacagaaggtttataagagtaatccccttcagatacacgtgtagcttggtctcttaaacgtcttaaaggttttgtaattcttgacgataagaaaaacgcaaagactgttgtaattgttaagaaaataacagccgtaattatagtgataatcgtaatagcattatttgtatcttcgattgatttcaagtctttatatataaagactccactatatttgctatgactattcttctgtgcttttgttggatagcctaacagaatatacgtttgggatgaacccttttctttaatcgttacatttcgagtaacagatttacctttatcaaacacatcgtcaaaatggtcgttgttgactacttcattcaacatttgctttttaatgttagaaagtgaagccgttgattgacgatgtttattatttataatcatcaacccaccaggattttcaattaatgtttgactatattttattgcttcttctttattatgtgattgttcgaccagtgaacttatacgtctagcatcttctcttatggcattttcagtttcttgtgtgaaatagtattgcataaaggtaattaaagcaatacttaataaaattaaaactgtcgtcactattaaaataatagttaaccacagtttaattacgacactatttagccggctcatcattagatttaacctcaaatttatacccaacgccccagactgtttgaatcatatgcgcagcttcgctagacacacgatttaacttttctctaagtcgtttaacatgagtatcaactgttcttaaatcaccatagaattcataatgccaaacttcttttaataattgttcacggtcaaatactttatttggtgttttagctaaatatattaataattcgtactctttaggagtcaaattaacttcttgattatcagcaagtacgcgatgtgcatcattatctatttctaaatgtttaaattcaatcacatcacgtgcgtgaggttcgctttgttctacagttgtagattgcgttcttcttagaagtgctttaactcttaagactacttctcttggtgaaaatggtttgacgatataatcatctgcaccagattcaaaaccttcaacacggtttgtttcttcacctttagcagtcaacataataatcggtgtttgtttatgttcacgcaatttagttgccacctggataccatccatttcaggcaacattaaatctagtagtatgcaagcataattattctccattgcaagttcataagcctcttggccattacttgcttcatggatttcaaaagattctctttctaaatacattttaagtaatcttctgattctatcctcatcatctacgataagtatttcgttcgacatacaggtcatacctcccacacatgcttttctttacaaaagtattatatcacaggaaagcgcatacagttattaaaaacctaaaattttgtgaaaaaattctcaaactttgtgataaatacatattttatttaattatttcccatgttctgctaaatgacgcatcacttttacttcatgaggcgtcaatacacgtccttcaccagcattcaaaccgacaacatttaaaggcccataatcaatacgagacagtttcgtcacttgatgaccaaaatgttcgaacattcttctgacttgacgattacgcccttcagtaattgtaatttccaccaatgttgtgtttttatctttatcttgtttcttaactttcacttcagctggttgcgtcataccatcctctaattcaatacctttttctagtgctttcacttcttcacgcattaaatagccttttaattttgcgacatatttcttcttaatttgatatcgaggatgtgtcattaaatttgtaaattcaccatcatttgtaagtaataacaatccagaagtatcatagtctaaacgaccaacaggataaatacgtgcgtctatatctttaaagtaatctgtaaccactgttcgtcctctatcatcagatacacttgttatcacttgagttggtttatggaataaaatataaattttgtcttctagttctattttaataccttcaacttcaatcgtatctgaaggcttcacttttgtccctaattcagtgacagttgtaccattcactttcactttaccttcagaaattaatgtttctgctttacgtcttgaagtataaccgctatttgctatacgtttttgtaatcgttctaattctttagtcattattttctcctttttgattgactagattactgaaaaaagcatccatttcttcatcgtcttcttcagttgtcggcaaatcttctatacttgaaataccaaatacatttaaaaataaatcagtagtgattaattgttggctacgctgttcattgaccactttagcctcaactagtcctttggcaatcaatgtcttgaccgcaccatctgaattgatactacgaattaattcaatatcacttcttgataatggttggttataagcaataattgatagtacttccattgctgcttgtgataatttcatttgtgacttttgttcaattaattgttcaatgtacgttgccgcttcttttttagtcgttaaaacatacgtcgttccaaatcgttgtattattaatccatgtgatgaataattttcaattaattctacgagttggtctttcgatatatctaaaatttctaatagctgtttttcatctaaaccttcatcgccagctgtaaataatagcgactctaatataccatgattatccaaaatggtagttcactcctctaataatgttaatatcttcaaaattacgttgttgctcaatattaattattcctgcctttgacatctctaaaatagctaaaaagtgagtgactacttgttcaattggctcagaaaacgtaaacagactaaagaagttaaaatgatctttatctttcaatctcgatgtcacttgttctgtagcttgttgaatggtaaatgtctcttttcggatttcaacagatttaggtgtatttaactcaactctatttttaactctttgataagctacaattaattcagttaagtcaatcgtatgatttggatcccaagattcatctgtttccaaatgagataaatctgtcggtctttttgtaaaataaaaatctctttcttctttcatgtcatttaaaatagcagtatattctttataattttgatattctattaaacgcccaactaaatcttcccgtgggtcatcatcaacatccatatctgatgttgattgtggtaatagcatcttacttttaatcattaagagttctgacgctaatactaggtattcacttgcaatattaatttcaagctgtttcattgcatgaacgtactgcatatactgctctgttaatgcttgcataggaatatcataaatatctatttcaaatttttggataagatgcagtaataaatctaatggtccattgaaagcatctaatttaacttcatacataatatctacctcgtattgcgtcatatgtgcataattctctaaaatattatagcatgaaaataacttacttttaaattggggtgataacaaaatgcaacaggcactgataaatttctattatcaatttcatactaagcaacattatttcctatgtcatgacattttagaagatgcatggaaagctgaaaataactacagtaagcaagatgcagttgttagtttaatcttgtttgcaactgcttgttaccattatcgccgcaataatttaaaaggcgcctataagtcttttaataaatcaaaagaaataatacaaaatgctaaagatagagatgcgttataccttaatttaaatgattatcagttgttaattgagcaacagattgcaaaattgaatgcagcaaagcctttttcatctgttatattaccaataactccagactttgaacgcatcatcaaggccaactatccagattatgattataatcacgaaacagcaacagatccttttattgtagaccatcacatgcggcgtgatcgttcagaagtgattgcagcaaaagaagaagcgattcaattaagaaaacatagacgtaattaatcaaccaatttaaaaaagccacaatagcactgacattttcagtcatgtgtattgtgacttttgagttatggttcacgttatgctctaggatgaaattggttatacatttttctaatttgagattttgaaacatgtgtatagagttgggtagtagatatgtcagagtgacctaacatctcttgtactgctcttaaatctgcgccattttccaataaatgtgtcgcaaaagagtggcgcaacgtatgtggcgttagcgtctttttaatgtttgcctttacaccattttgtttaatcattttccatattgcttgtcgtgataaaggtttaccatgcatatttaaaaataagacttcggtaacagtcttttttaaaagttgcggtctaatcgtttcaatataagtagttaagtactcaatgactgcgtcgcctaatggtacaattctttctttatcgcctttaccaaatacgcgtacaaaccccattattaagttcacgttctctaactctaaatgtatcaattcagatacacgcattcccgttgcgtacagaagttctaacatcgtacgatcacgataaccattaattttatttaaatccggcgtttctaataaagccaacacttcgtcaacatttaaaacgtcaggcaattttttgtcatattttggtgaatctaataataccgttggatctttcgctgcatatttttctcttatagcaaattgatgaaaactacggattgttgaaataaatcgcgcaatagatttagcagattgcccttggtctattaaatgccccaaacactcttgaattaattgtcgatctataaaatcaatatgcgagatatgatgttcagtcatataatcttgatactttttcaaatcacgtctataagcaccaattgtgttagaacttagacctttttcaatttgtataaaacgcaaatattcttcaataattgtttccataaccacacctctaaaaaaagcgaaggttaatttaacctacgcaatttactatcctttacctttagcttggcacgtttcacacacaccatggaaagttaaacgatgatctaaaattttaaaattgaactcattttcaactcgattttcaacttctggtaacaaatcttcatcaatttcatctacacgaccacattccatacatactaaatgatggtggaaatgttttgcgccttcttttcttaaatcaaaacgagcgacgccatcaccaaagttaattttgtcgacaacttttagttcagctaacaactctaacgttctgtatactgtcgccaagccaatttcaggcgctttgtcttttactttcagatatacgtcttcagcacttagatgatctttttcattttcaattagaactctaacagtagcttcgcgttgtggcgttagcttatatgatgattgttgtaattgttgcttaacgcgatttaatcgttcttccaacgatgtccactcccctactaataattaaaatcattacaaattatttcaaacttcacaattaaaactaacagttttctcaataaaatgcaagcttttctcatttgttatttagaatgattataatttaataataggtgttgcaatgcaatgatagtcttcgcatcttctatttctttattcattagcatcgatttaacattctcaatcggaactttaatgacttcgacaaattcatcttcatctaagtgaactgtaccttcttctaaattatccgtaaaatatattgataattgttcatcacaaaaacctggtgaaccatacatatctacaacatgtgttaactctttggcaatatatcctgtttcttcttctaattcacgcttagccgcttcgactctatcttcatcatcttctaatttaccagctggaatttctagcaatggtttttctactggtttacgatactgtttcactaatacgacttcttttttaggtgtcactgcacaaacagcaactgcaccattatgataaactaattctcttgttgacgtttcaccgtttggtaatgtcactgtatgaatttctacatctacaattttgccattataaataactgttcgatcaattgttttttcatttaaatccattataatcacgttcctttaaattcatattatatattgatacactatgcttgttagctaaagtgtatcgaaaggagaacagacatgcaaaaaaatatattaaaaagtggtattgcattatctgaattaggtctaggttgcatgagtttaggtacagatttaaaaaaagccgaacaaattatagattgtgctgttgaaaatggtatcacttattttgatacagcagacatgtacgataaaggtataaatgaatcagttgttggtaaggcacttcttaaatatcaacaacgcgatgatattgtcattggtactaaagtaggcaatcgtttaacaaatgatggcagtacaacatgggatccgagtaaatcctatattaaagaggcggttaaaggttcactaaagcgtttaggtattgatcatatcgatttatatcaacttcatggcggaaccattgatgacccattagacgaaacaataagcgcatttgatgaattgaaacaagaaggaattatacgtgcttacggtatttcttctattcgcccaaatgtaattgattattatttaaaacatagtcaaatcgaaacgattatgtctcaattcaatttgattgataatcgtccagaatcattattagatgcaatccacaacaatgatgttaaagtattggcaagaggacctgtgtctaaaggattattaacttcaaacagtgttaatgtgctcgacaataaatttaaagatggtatttttgattattctcatgatgaattgggtgaaacaatagcctctattaaagaaattgaaagtaatttatctgcattgacatttagttatttaacatcacatgacgtgcttggttccatcattgtgggtgcaagtagcgtcgaccaattaaaagaaaatattgaaaactatcatactaaagttagtttagatcagattaaaacagcaagagctcgtgtaaaggatttggaatataccaatcatttagtgtagaagtcattttcagtaataaaaacagcagtatgaggcgtttcattataaaaatgccttactgctgttgtttatgtaaaattcgctataatttatgattaagattactcacttatgatagaaattaaagagttgtcctcacgcatcagtatttagtaatttcgccctgcgccagtgcctcaagcaaacttctgctacttcatcttttaataattttattaaaacatctttctatatttcacttcgcatgttgattcatcattattagttattatttgtacacccagcacatttccttgcaacacaagtagtttgaatttttcacaagtataatataatgtactgtctgaaatttggtctacagaaatatcgcctaaaatatccagcactgtaaattcttcaaacactgatagttgttccgcatatcgtacacaaagtcttaccacactctccgattgacagttcattgccatcccacctacttatgctttatttttaaataatttagggaaacatcgttcaaaaaatctaggcgcaatttgatacattttcaacgcatgatgcatccatttaggccgattaatttctaattgttttgttttaatgccataaatgatatcttctgcaagctgattagcatcaagcatcattttccccatctttttagcatacttcattgatgggtcggctttttgatgaaaaggtgtatcaatcgggccaacattaactgtcatgatatgtaagtttggtgactctagtcttaaagcattcattaatgcataaaaccctgctttcgatgccccataatgtgcagcatttgcttgtgtggaaaatgcggcttgacttgatatacctacaatatgtgcgttagatgttaaatatggtctcaacacagtatataaaacattaaaactaattaaattaagctgatacgtttcaatcatttctgaaaaactatggtctgaaatagatttgaaataacctaaacctgcactataaatgaatccatcgaatgatgtattgtcttcaaattgcaatgcctgtgtcgacttcaaatcatttaagtcacaaggaataacatttatagttttccccaattcctggtcaaagattctagttgctttatcaacatcacgcaccaacaacgttacatgcactttattttctagtaactttcggacaatcgataaacctaaaccacttgtaccaccagtcactataaaatgttgtcctttcatcaattaaccttccttttcaattatatagaatgcaatttatcaactttacataattgagacaagttgattatctttcctaatatatatacaataataagaaaatataacatacaaatcaaaaactaaagggatgtgacgttaatgaaactcgtattttatggagctggtaatatggcacaagctatatttacaggaattattaactcaagcaacttagatgccaatgatatatatttaacaaataaatctaatgaacaagctttaaaagcattcgctgaaaaactaggtgttaactatagttatgatgatgcgacattattaaaagatgcagattatgtatttttaggtaccaaaccacatgactttgatgctctagcaacacgcatcaaaccacatattacaaaagacaattgcttcatttcaattatggcaggtattccgattgattatattaaacaacaattaaaatgccaaaatccagttgctagaattatgccaaacacaaatgcgcaagttggacactcagttactggcattagtttttcaaacaactttgaccctaaatctaaagatgaaattaacgatttagttaaagcatttggttctgtaattgaagtatcagaggatcatttacatcaagtaacagctatcaccggaagcggcccagcatttttatatcatgtattcgagcaatacgttaaagctggtacgaaacttggtctagaaaaagaacaagttgaagaatctatacgcaaccttattataggtacaagtaagatgattgaacgttcagatttgagcatggctcaattaagaaaaaatattacctctaaaggtggtacgacacaagctggccttgatacattgtcagaatatgatttagtatctattttcgaagattgtctaaatgctgccgtcgaccgtagtattgaactttctaatatagaagaccaataaaaacaaacccgccaacacatgtatgcatcatcgcaagcactgtgtttgacgggttatttttataaattattactatttggcaagcattgtttattactttgtcattagattttaaaactatcaaaatctttcacaaaattaaaattcggcgtatcctcattttgtatcaatgtttgataaatttcatttatatcttctgtattatagcgattgctcaaatgtgtaatcaacgtacgtttaacattggcttcttttatcaatgcaaatacgtcttcaatatggctatgatgataattgttggctaaatgcttttcaccatctatataggtcgcttcatgtaccatcacatcagcatctctagaaatcacacgttcattagaacatggttttgtatcaccaaaaattgctacaattggaccctgtttggactcacctctaaaatcttttgattgataaacttgaccattatgttcaaatgtatcatgagattttacttcttgatatttaggacctggttcaagaccaatgttttttaacgcttcaacattgattgtacctgtagtttcaggtgccattactctatatccatatgatggaataccatgattaagtaaatgcgcctctacagtaaaaccatcatgatgatatgttagatgatcatcgatttcaatatatgtaattggatagtttaaatgtgactctgataaattcatagacatttccacatatgctttaattccttttggtccaactaatgtaagcggcttttgttcaccaccctgaaaagaacgactagaaagtaatcctggcaaaccgaaaatatgatcgccatgcatatgagtaataaatatatgtgtcacttttcctaatttaattgcatgatgtaaaatttggtgctgtgtaccttcaccaacgtcgaaaagccatatggaattggaatatggttctaaatttaaggcgattgcttgtgtatttctctcttttgtaggcaaacctgcactcgttccaaaaaatgtaacttccatatatgcccctccttttcttcaattcattttatcataaaatttgtatcaatttagttttaatttacacttgaatcaaaatctgtttaaaattcgtctttgctagttaatttttctaactttaacgtagacataactatataaattttgataattacgttatacttatcattaataagtatcacattaaacatgatacatgaatcgatatttcatttaagacaatgcatactgtcgagcatattgaatgacctgctgaatggattatcttataataataaatcatatatctaattaagaattgaggttttaatcttgagtactaaaaacaaacacatcccttgtttaatcacaatctttggtgcaactggtgacttaagccatcgtaagttgtttccatcaatattccatctctaccaacaagacaatttagatgaacatattgccatcatcggtattggacgtcgtgacattactaatgatgatttccgtaatcaagtaaaatcatcaattcaaaagcacgtaaaagatacaaacaaaattgacgcgtttatggaacatgtcttctatcatagacatgatgttagtaatgaagaaagctatcaagaattattagattttagtaatgaattagatagccaatttgaattaaaaggtaatcgactattctatttagcaatggcaccacaattctttggcgttatttctgattatctaaaatcttctggtcttactgatacaaaaggatttaaacgccttgttatcgaaaaaccattcggtagtgatttaaaatcagccgaagcattaaacaatcaaattcgtaaatcatttaaagaagaagaaatttatcgtattgaccactatttaggaaaagacatggttcaaaatatcgaggtattacgttttgcgaatgcgatgtttgaaccattatggaataacaaatatatttcaaacattcaagttacttcttctgaaatactaggtgttgaagatcgtggtggttattatgaatcaagtggtgcactaaaagatatggtgcaaaatcacatgttacaaatggttgcattattagctatggaagcacctattagtttaaatagtgaagatatccgtgctgagaaagtaaaagtacttaaatcactacgtcatttccaatctgaagatgttaaaaagaactttgttcgtggtcaatatggcgaaggctatatcgatggtaaacaagttaaagcataccgtgatgaagatcgcgttgcagatgactctaacacacctacctttgtttcaggtaaattaacaattgataactttagatgggctggcgtaccattctatattcgtactggtaaacgtatgaaatctaaaacaattcaagttgtcgttgaatttaaagaagtaccaatgaacttatactatgaaactgataaactgttagattcaaacctattagtaatcaatattcaacctaatgaaggtgtgtctttacatctaaatgctaagaaaaatacacaaggtatcgaaactgaacctgttcaattgtcttattcaatgagcgctcaagataaaatgaatactgtagatgcatatgaaaatctattattcgattgtcttaaaggggatgccactaactttacgcactgggaagaattaaaatcaacatggaaatttgttgatgcaattcaagatgaatggaatatggttgatccagaattccctaactatgaatcaggtactaatggtccattagaaagtgatttattacttgctcgtgatggtaaccattggtgggacgatattcaataattgaattaaaacgcacatgttaaacaaaaataaatgagcgaatgacaaggattgattacgaatcaagtaaatcaattgttctatcattcgctttttttctagactatattatgaaattatattttacaatgcccaaaactattttaataatcattgaacaaatgggtgtataatttatagaaataatgtagaataaaaataaatgattgaattaattggagtgaaagttttggacgttatcaagcaaatacaacaggcaattgtttatattgaagatcgtttattagagcctttcaatttgcaagaattaagtgattacgttggtctttcgccataccatcttgatcaatcatttaaaatgattgtcggcttatctccagaagcttatgcacgcgcgcgtaaaatgacactcgctgcaaatgatgtaattaatggtgctacacgacttgtagatatcgctaaaaaatatcactatgcaaattcaaatgattttgcaaatgattttagtgattttcacggcgtatcacctattcaagcttctactaaaaaagatgaattacaaattcaagagcgattatatatcaaattatcaactactgagagagcaccctatccatacagattagaagagacagatgatatttcattggttggatatgcacgatttatagacactaagtatttgtcacatccttttaatgttccggattttttagaagacttgctcattgatggtaaaattaaagagttacgacgatataatgacgttagtccatttgaactatttgttattagttgtcctcttgaaaatggtttagaaatatttgtaggtgtaccaagtgaacgttatcctgcacacttagaaagtcgatttttacctggcaaacattgtgcgaaattcaatttacaaggtgaaattgattatgcaactaatgaagcttggtactatattgaatcaagtttgcagttaacattgccatatgaacgaaatgatttatatgttgaagtgtaccctctcgatatttcatttaatgacccattcactaaaattcagctttggattcctgttaaacagagtccttatgacgaagattaaataattaaaaacaaagaagccccctaatatatctataggtctacaaatggccttagatactattagggggcatattaatatgttaatttaattcgataacacatgcttcatatggacgcaactgttttaaattaactttggcatcataattaaatagcttcacttctccatgacttacatcaaatggtacagttaattctgcttcgtggttagtaagattacctactataagaacttgcttttcatttaatgttctcatgtatgcaaaaacttgtgaattttcagcatctactaaatcaaattgaccatatacgtatacatcattagattttcttaattgaattaaatctttataaaattgtaatactgaatgctcatcttctaattgtagtgcaacattgatagttttataattcggattcactgggaaccacggttcaccatttgtaaatcctccatttaacgtatcatcccattgcattggtgtgcgagaattatctcggttctcatctttatatttcgcaagtaaagcgtctacatctccaccttgagctttcacaatttgatagtcatttttaacagcaacatcgttaaatgtttcaatactttcaaatggataattcgtcataccaatttcttgaccttgataaatgaatggcgtaccttgttgcaagaaataaacagctgcatgacttgttgctgattcataccaatacttgtcatcgtcaccccacgtcgatacacgtcgtggttggtcatgattttcaataaacaacgcattccaacctttattttcaagttgtttttgccatctatttaatacagatttatacgaatttacatcaaaatgagaatcaccactattccacagtcccaaatgttcaaattggaatatcatattaaatttaccattttcttccccgacccagtcatcagcatcatcagggcttacaccattcgcttcaccaacagtcataatgtcatacttacttaatgagcgatctttcatctcttgtaaccaagtttgtatacctggctgattcatatctacatcaaatgctggggcatatgttttaccctcaggtacaggtaagtcacccgcttcaaacgtcttcttaatatgcgtaattgcatctactctaaatccatcaatgcctttatcaaaccaccagttcatcatttcgaatacagcatctctaacttccggattaccccaattcaaatcaggttgttttttactgaatagatggaaataatattgctcagtattagcatcatattcccatgtagatccattaaatatactttcccagttgttaggttcagagccatctggctttggatcttgccaaatgtaccaatcacgtttgggattgtctttactagatttggattctataaaccaaggatgttcatcagatgtatgattcacaactaaatctaaaataagcttcatgcctctatcatgaacaccttttaataaacgatcaaagtcttccatcgttccaaattcatccataatctcttggtagtcactaatatcataaccattatcatcattaggtgatttaaacattggactgagccaaatgacatcgatacctaaatcttttaagtagtccaatttatcaatcattccaggtaaatccccaataccatcgtgattactatcattaaaacttcttggatatacttgatatgctactgcttctttccaccattgcttattcattttaaaactcctttgctatcgctgtgttgattttcttatttttaattctgtatctataatgacgagttcaataacatcctgtgctttgttttttaatatatttaaaatagcagacccggcttgttgacctaacattcgaggcttgatgtcaatactggtttgaggtggtgacgcaatttcggttaaataagaatcattgaacgttgctgtcattacatctttcggaatttcaatattaagttcatataggacacttaaaatcgctaaatgtaacatagcatctaacgaaatgattgcctgtttaatgtttgggtccttcaaacgcgtttgtaaattttgcatgtaattaaaaataacttctctttcattactagtctcaataatttgataattaattttattttgagaagctatcgtttcaaatccttgaatcctgtctttcgaaacttcaaaatcgcctttttctgtaataaatattaattcatctacaccttgttcaataacatgtcgtgtcaaattttcagaagctaatatattatcattatctatgtgtgtaaattgatgatctatatccgatgtaggcttaccaatcacaataaatggcatgttttcatcaattaacatttgtttaatcggatcattttcttttgaatagagcagtataaacgcatcaaccattcgttgtttaatcattttataaacttcatccattaaatcattcatattatttgagactgtcgtttgtgtaccatagccatgctggttgcacgtttcagaaatccctagcaatacattgatgtagaatggattcagtcgaataggctcctcagacccttttaacactaaaccaattttataggtttggttagtaattaaagttctagcagcggtattaggaaaataattcaattcttccataactttcttcacttttgaaattgtcgcttcactaatacgttgatttccttttataactcttgaaactgtcgaaggagaaacaccggcttttagtgcaacatctttaatcgtaaccatttaatcacctcctgttaatctctgcgttggaaaacgcttccaaccccctgtataatatcagtttagtcacactttctaaaaaagtcaaaagatttgtgcaaacgattgcataaaacgataaaaataaaaccttcatactgaaattcaatccgaaaatcaatataaaggtttgtataaatattaaaatcgattgtttagtcactaactgcaaaatagttgccttggccatcttggaaattaaatacacgttgaccattcatttctactatatcatgcccagttaaacctaaatcatttaattttgagtataatgcatcaaagtttttctctttaaacattaaagatggtgttcctaggttcacctccgggctatacttttcaataaattcttttgccataatcgtcaatgacgtttcagcatctttcgtaggtgatacttcaactgcaacatagtcctcagctaacggtgtttcacttacaacaacaaattctaaagtttctgtccaaaatgctttcgctttttcaacatcatcaacatataacataacttgatttaacttttccataaaatagtacctctatttctctatagtacatgctatcataacacagtaaatattttattacttcacaaaatgcttaaaaatatggcgggatgattttaaggtcaaagataatacttgtgtaattttctataggttgtagctactctatcacactctcttttatatttatcaaaagataaaaaaaaggatagtatctttcaactatcctttagtcaatattattcttcaatccattgtgtatggaatacgccttctttatcttttctttcgtacgtgtgagcaccgaagtagtcacgttgtgcttgaattaagtttgcaggtaaatcagctgcacggtaactatcatagtaattaatacttgatgagaaaccaggtgttggtacaccattttgaacaccagttgcgacaacatcacgtaacgcatcttgatattcagtaacgatgtttttaaagtaaggatctagcaataagttttgtaatcctggattattatcgtaagcatctttgattttttgtaagaattgtgcacggataatgcaaccttctctccaaatcatagctaaatcaccaagttttaagttccattcattatcttcacttgctttacgcatttgcgcgaaaccttgtgcataagaacaaattttactcatatataatgctttacgaattttttctaaaaagtctttcttgtcaccatcaaatgatgcttttggaccatttaattctttagaagcatttacgcgctcttctttgattgaagagataaaacgtgcaaatacagattcagtaatgattgttaatggaatacctaattctaatgcattaattgaagtccattttcctgtacctttttgacctgcagtatcaagaattttttcaactaatgcttctttattttcatctaatttcatgaaaatatcaccagtgatttcaattaaataactttctaattcaccagcattccagtctttgaacgtttgagcaatgtcttcatgagacatgcctaataattctttcatcatagcataactttctgcaattaattgcatgtcagcatattcgataccattgtgaaccattttcacatagtgtccagcaccattaggtccaatataagtaacacatgaagcaccgtcttttgcctttgcagcaattgcatcaagaatatctgcaactttgttataagcttcttcttgtccacccggcattaatgacggaccagttaacgctccaatttcaccaccagaaacgcccataccaataaagttgattgcactttgtgctaatgctttattacgtctgatagtatcttgatagtttgtattaccaccatcaattaaaatatctccatcatctaataagggtaacaaactatcaatcgttgcgtccgtagctttacctgcttgaaccattaataaaattttacgtggtttttctaaagaattaacaaattcttccaatgaatacgttggatgaatatttttcccttttgattcttcaaccattaaatcagttttttcacttgagcggttaaatacagatacactatatccgcgtgattcaatattccaagctaggtttttacccataacggctaaaccaataactccaatttgttgtgtcatattacttacctcacttgttgatttttcattagtattgtatcacaaaatagacatacactacactaaatcatttcgattgtcgcgcaactattttgattatttctaacacttgacttgcaagcaagttcaatgatttaatcggcattctctcatttgttgtatggattttttcataacccactcctaaaatgacagaaggaataccaaatgtattaataatactgccgtctgaaccgccaccagaaataattgtatttgcagataatcctaaattacgagcactttcttgtgcaattttaacaaccgtttcattatcattaattttaaatcctggataactttgctccactgtaactactgctttcccacctaattctgatgcagttgtttcaaacacatcagtcatatgtttgacttgtgtttttattctttctggatcgtgagaacgtgcctctgcttctaaaatgacttcatctgcaacaatattcgtagctgaaccgccatgaaacttaccaatattggaagtagtgatttcatcaacttgtcctaatttcattcgactaattgctttcgccgcaatattaatagcactaacaccctcttttggcgtacttgcatgagccgttttgccaataattttagctgaaattaacatttgcgtcggtgcacctacaaccgtagtaccgacatcagcacttgcatcaatagcatagccaaagtccgcgtccaacaactctgaatttaattctttagcaccaattaaacctgattcttctccaacagtaatcacaaattgaatttgtccatgtgggatttgttgttcctttatcacttgcaaaacttcaagcatagctgctaatcctgctttatcatctgcacctagaatagtcgtaccatcagagtatatgtagccgtcatcttttacaattggctttacactaattgcaggtacaacagtatccatatggctcgtcaaatataatttaggtacttcgccttctttgatagcactattcattgtacacactagattattggcacctaatttaggatgtttagccgcttgatcttctttaacatctaaccctaatgctatgaatttttcttttaaaataggttggattgttgattcattccctgtctcagaatcgatttgtacaagttctaaaaacgtattaagtaatctttgctcattaatcataatggaaccccttttatcaaaattttcaagtacgccaaacggtaaaaattgatgaaataaaatgttacagtaattgacgttacacagatttatcaggcttgtaaattgtgtcatattattttcaatttaatatatatatttattgtaactcaaactaagctttgtcaaaaatatattgattgatttttcgaagatatcgtataatgaggaaaatgacataagcaaacttactcatgttttttataatattcctttatgatgattgctagttatatcgtctcaagttaaaagttttatatcttatgtcgtaattattaatacaaaggttattcatttggaggcacacaaaatgcaaaataaagttttaagaattatcattatcgttatgcttgtatcagttgtattagcattgttattaacgagtatcattccaattttataaactatatctcaactacctatacaaaatcatacaattaaaaatccatccgttataaacgcatgtattaataagttatcgtattgcaacaattactttcaaacatgggtcatacggatggattattttttaagctacttcactatgcattttcaatgaaccaaattgcgatttgatttgtaaatattcttctaattcatttaatatttgaataatacttgctctcgagttaagcgctttgtgtgttgttggcaatggcagttcatccaatttcaaacgcgtctcatacaaattgtgtaaacgcattgctgtatagtcattactattcacatttagaccaatttctttcagcagtgacgcaacatcatttaaaagtggatctttatgacagatactttcgatgagcggtttcattctcattaacaattccacttgctcttctcgcatatcaaaataatgatagtatgaattttcgtttctaacaaaatgatttttaacatctcggaacgcgatagacttcgcctttttaatatttaaaagtaacgcttcaaattcaatcgcaatggtatcttcatatttttcacaaatataactatatttactaaaaatatcagcaatttgttgctcaattttacatttgtattcgtctagctgtttgtctaaacttggcatcattaaattcattgtaaatgcaatgcttagtccaattaacagtaataatgtttcattaacaattaaatgtgtatcaattgattttgcattaaaaacatgaagtaatataacgcaactcgtaatgacaccttcttgtacttttaatacgacagttaatggtataaataacaatacgataataccgagtacaattggactctgacctaataaactaaatattgctgaacctaaaaacaatactaaaaaacatgatactaatcttgaaataatcgcttgtagcgaatgtacttttgtatgtttaatacataatacgactaatatggcgcttgaagcataattatctaaacctaacagcttactaataattacacctaaagtcatacccactgctgtttttattgttctaaatccaatcttgtaaggatttaactttaacatgggttagcgcctcttatctttcttcacaatatttattgaataatgtttgtaattgattaattacgttcatcacatcatgaccttcgatttgatgtctttcaatcatttctgtaatctttccatcttttactaatgcaaatgacggacttgaaggcgcataaccttcgaagtattcacgcgctctttgtgtcgcttctttatcttgtccagcaaatactgtcactagacgatcaggtaatacgtcataatgtaaagcatgtgatgctgctggtcttgcgataccacctgcacaaccacatacagaattgatcataactagtgttgtaccatcttgtttaaggactttgtcaacatcttctgcagtagttaattgctcatatcccgcagattcaatttcattccttgcttgttctacaacaccgttcatgtataaatcgaaattcatgtccataagttcaatcacctatccctttatatttaaactatcctcattctactaattaataacatattgttcaataaactaatctgaatcacacctatatttagacacaattttaacaatataccaaacattattgtgcttaaaatcattgaaactaatttattcacctgttttcattaatatgtttaaagtatgatgtcttattttgactatactgcaaaaatgcattcaaccatgttgattattgttctttatctttttttgaatatattgcaaatattttattgtccaaaaaaatacatccatcgacaagaacaagataaaacaagttgtcgatagatgcatctatgttatcactaatatatatttgtattttctaaagtatactgttcgatacgctgtttaatatgattcataaatttacctgtttgtaaaccatctaaaatgcgatgatctattgaaatacataaatttaccatacttcgaattgctatcatatcatcaattactactggctttttaacgatggattctacttgtaaaatcgctgcttgaggatgatttataatccccattgatgatactgaaccaaatgtaccagtattattaactgtaaatgttccaccttgcatatcttcagttgtcaattgcttattacgcgcttttgttgctaaagtattaatttctctagctatacctttgattgacttttcgtctgcatgcttaatcacaggtacgtataatttattttcatcagcaacagcaattgaaatattaatgtctttatgtaagacaatttcatttccttgccagctactatttaataatggatatgcttttaaagcatctgctacagcttttacaaagaaagcaaagaaagttaaattatatccttctttatttttaaagttgtttttataatggtttctcgtattcacaaggtttgtagcatcaacctcaatcatcatccatgcatgtggaatctccgttacactattaaccatgttttgtgcaattgctttacgcacaccatttactggtattgtgctattttcactattgtcttcagatgattggttacttgatgtagctactgaagttgattgtgtttgaacttgtttgtcagattgagctgtggtaccaccattttcaataactgacattaaatccttcttagttacacgaccttcaaatccactacctacaacttgtgataaatcaatgtcatgctctgaagcgagtttaaatacaacaggtgaaaagcgaccattatttcgtggttgattttgtttagcagtagatgtctgttccactgttgcactagcttttttagtagatttctgagtatgctcatccacttttgcttgtatctcttcagttgtttcatttgtcttttcatcagcagtttcaattttacagataattgtatcaatagctaccgtctgccccgcttcaactaaaatttctgtaattgttcctgatatcgtggaagggacttcagccgtcactttatctgtaataacttcacataatggttcatattcatcaatatgatcaccaacagaaactaaccattgttcaatggtaccttcatgaacactctcacctaacttaggcattgttatttccatgactttccctccctagaattctgctaattcacgcattttatttaagattttttctggattcatcataatttcattttctaatacaggagaaaatggcatagatggtacatctggagcagctaaacgcatgattggtgcatctaaatcgaacaagcaatgctctgcaataatcgctgacacctcagacataatactaccttctaaattatcttcagttacaagtaaaactttacctgtatgtttagcacgatcaataattgtttctttatctaatggataaacagttcgtaaatctacgacttcaacattgataccgtctgctgctaaaatatccgctgcttgtaaacaataattgaccattaatccataacaaaatactgttaaatcttcaccttcacgtttaacatctgcttttcctaaaggtacagtgtaatattcttctggcacttcttcctttaagaatctataagcctttttatgttcaaagtataaaacaggatcatttgattcaattgaagataataatagacctttagcatcatacggtgttgaaggtataacaattgttaaacctggtgatgaagcaaatatactttcaacactttgtgaatgataaagtccaccatgaacaccgccaccaaatggtgcacgaatcgttaatgggcattgccattcattatttgaacgataacgcattttcgcggcttcactaataatttgatttgttgcaggtaagataaaatctgcaaactgaatctcagcaattggtcttttaccaaccatagctgcgccaatggctgtgccgacaatatttgactcagctaatggtgtatcgataactctgtcctcaccatattgttgttgcagtccttgagtagtaccaaatacgccacctttttttccaacatcttcaccaagaataaatacatctttattttgttgtaatgctaagtcttgtgcctggcgaatcgcctctaaataagataatttagccattagttaagactcccttcttcgtacacaaatgcataggcttcttcgacacttggatatggcgcgtcttcagcagcctttgttgctttattgataatgtctttatgttctgcttctatttctgccaaccaagcatcatcgataatgccagctgaaagcaactcttttttgaacttttcgttgcagtctgcttttttaagcgcttcacgctcttctttcgtacgatattggtcgtcgtcatccgatgaatgagctgtcatacgagaagttactgcttcaatcaaagttgaaccttgaccagaaatagctcgttctcttgcttctttcatcgctttatacattgctaatggatcattaccatctacttgttcaccatgtataccgtaaccaagtgctctatccgataatttttcagctgcgtattgtaatgaatcaggtactgaaattgcatatttattatttataatgacacatacaaaaggaagtttgtgtacacccgcgaagtttaaaccttcatggaagtcaccttggtttgagctgccttcaccaacagttgctgttgcaattttcttcttaccatccatttttaaagctaaagcagcaccaacagcatggggtatttgagttgctaccggtgaactttgtgacaaaatattcttagctctactactaaagtgtgaaggcatttgttttccaccagagttaacatcgtctttctttccaaacgctgataaaaacgtatcatacgctgagatacccatataagtaacgaaagctagatctctataataaggcgcagtaatatcaccttcttctaatgcgtatgccatcccaatctgagttgcttcttgtccttgaccacttacaacaaatggaattttacctgcacggttcaataaccacagtctttcatctatttttctacctaaatccatccatttatatattacttttaggtcttcttcgctaaggcctaatgatttataatcaatcatgttaaatcctcctatttatacgtgaatagctctactttctgctttcaatcctaattccatcaacacttcagagatggaaggatgtgcgtgtgttgttagtcctaattctaatgccgagccattcatgaactgtaacagtgatgcctcattaatcaattctgttacatgtggaccaatcatattaatacccacaatttcttcagttgattgatcaatcaccatttcgctatacccttcgtttgcgtcatggctatcaatcactgctttaccaattgctttaaatggtactttaaaacttttaactttcattccctctgcctttgcttgctcaatgtttaaaccgatagaagcaatttcaggttgtgaataaatacacttaggcatcatgttatagtttactgggattgggttcccttcaaacatatgatcgacagccacaacaccttcttttgatccaacatgtgccaattgtaattttccaatacaatcaccagctgcataaatatgtttatcttcagtttgttgaaattcgttcgttaaaatatgtcctgatgttgaaagttttattttagtgttgtttaaaccaatatctgatgtgttaggttttctaccaatcgatagcaacactttatctactttaattatgtctgaggaaatttcaaatgtaacaccatcttcgttagcacttatatcattttcagaaagttttattccctcatagaatttaacaccacgtgctgacaatgatttttttaatagttgtgaagcttgtttactttcagttggtaaaattctttcaccagcttctataactgttacgtcaacacctaaatctatcatcaatgatgcaaattccattccgataacaccaccaccaataataccaatacttgatggtaacgtctttaatgataatatatcatcgctagataaaattttatcatgatcaaatgataagaatggcaactctgcaggcgaagaaccagttgcaattaatacaaattggttgggtaataagtctgattcaccatcttcatattcgacagaaattgtgccactttgaggtgaaaatatagatgtacctagaatacgtcccgtgccgttataaatgtcaatgtgattgtgttgcattaaatgctttacaccttgatacatttgattaataatgtcttcttttcgtgccaacatattttcaaaattaacattagcatctttgacatcaacgccaaacattgctgcctgttttactgtttgaaatacttcagcagatttaagcagcgatttagtaggaatacaacctttatggagacaagtacctcctaatagttgtcgttctactattgctactttcttacctaattgagacgcacgtatcgcagcaacatatcctgcagtacctccaccgagaacgactaaatcatattgtttctctgacatgttcttactcctaactaatgatatatatccattgaaaatttattaatacatagttttcatgtccattaattacctattttacatgattgtctatttagtttgaatgcacataaataaatccacaaatgagtattcaacacactttggaaattatctacgtctttgattgtgttgtatcatttctcttgcattttcacgagttaaatcagtaacacttgcacctgaaatcattcgtgcaatttcatctactttatcatcgccaattaactcttgaacttgtgttgttgtacgatcatcttttgatgatttcgaaattaataaatgatggtcgctcatcgatgcaacttgtggcaagtgagatatacaaataacttgtatatattctgctatatctcgcattttctctgccattttttgtgcggcttgtccagatacacctgagtcaacctcatcgaataaaattgcagtttgacctctcgatttaacaaaaatactttttaacgctaacataattctagaaagttctccacctgacgcaattttatttaaactttttaatggttcccctttattaggactgattaaaaattctacaaattcgattccatcaatattcggttcttctaattttttaaatgaaatctcaagatttgcatctttcatttgtaagttttgaatttccgatacaatgtggtctcttaactccctagcaactatacgacgctgcttagataacgcttgtccaacctctataacttgattatacaatgcatttatttcttctcgtaactgcgatgtactttgttcatagttttcaattttattgatttcattattaagcttttcttgatatgcgattaattctgaaatatcttttccatatttgcgttttaaattattcagcaaattcatacgagattcatactcgtttaacacttgttcgtcgaattctgtattagccatttcatcatataactcatgttttgcatcttctaaaatgtaataaaattgatcaatatcttcttttaatttgtcatatttgtttggaactatatcgtttattgttaacaaatggttgcttagttcatacaaacgatcagtgatagcattttcatccgttaatgtcatatgtgcgttattaagcgctaaacttaatttttcagagttttgaatacgtttaatatctatttcaagttgctctatttcgccttcttttagatgtgcttcagacaattcttctaattgaaatttcattaaatctaaacgctgcagcaatgcttggtctgctgattctaaatcttctaactcttgctttttggctttataattttgaaaagtttggtgatatttatccaacaaatcttgataacgtgattctgcgtaattatccaataatgttaaatggtatttttgtttcaacaaagattgcgtttcatgttggccatgaatatctaataattcttgcataacttttcgtaaatcttgtaaagtaactgtttgattattaattttacaaagacttttaccagagctgaaaatttcccgtttaactaataaaaaatcttcatctacatcaatatccatatttttcaatatatgtatagcatctttactctcgtcaatatcaaatataccttcgatgacagcctttttttcaccatgtcttacaaaatcagatgaagctctcattccaattaattgtccaattgcatctataataattgacttacctgaacccgtttcaccacttaaaacagttaaaccatcagaaaattgaatttctaactcttcaataatagcaaattgcttgattgataaggtttgtaacataaactcatcgcatccttataacaaattgaaaattcttgacttgatttcatcacttgcctctttgcttcgacaaataattaaacaagtatcatcaccacaaattgtgcctagtacttcttcccaattgatttggtctaatatagctccaatagattgtgcattaccaggtaatgtttttagaacaagtaaattatcagtaccatctatattaacaaaggaatccattaaataacgtcccaatttttctaaaggatgaaattttctatcatttggtaaactataaacatattgacctgaaggtataggtactttaataagttgtagttctttaatatcacgagaaacagttgcttgagtgacatttaaatcataatcgtttaatcgtttaactaattcatcttgtgtctctatctgttcatttgaaataatttctctaatttttatatgcctaaccgattttttgggcacagtaaacacctctgattacgaatatttatacatttattttaacacatgcactgatttacgactactaaacacctttacgtaaaaagggtaaacatggtttatctatcttgattatctatttataaatatttttcatattacgcataacaattgcttaaaatatgtataaaaatgaatatatgtgtaataaacttgctaattattagatttaataagcgtcaattgtttgaacatatttaattaaaatcacattgatatcacagatgcgaatattgtcgtatagaaattgaaaattctatttttagatgaaagtctttaacataattttaagtttcaacatgagaaaaatcgattaacaaacaacgtcagttgaatatgccttttgagacatttcaaacttaacaattgttgctaatcgatatatttgcttttagtgatccctgctataaaataaatcaacgatttctaataagtgttttgtattgaattgttcatcaatttgcattagttcatccactgctgcgtctctatgataagtcaatttatcttctgcgccatcttttcctaataaactcacgtatgtacttttattattttcaagatcgctgcccacttttttacctaacttcgcttcatcaccatagcagtctaataaatcatctttaatctgaaacatcatacctaaatgataactataactttctaaatgttctttagttgcatcatcgacattagcgatatctgctgcactcataaccgcaaatgttaatagtgctcctgtttttgttttgtgtatcatttccaaaatttcaagatcaattggttggccttcgctttgcatatctaacatttgaccgccgaccattccaacatgaccacttgctattgacagccgttgtagaacttttatttttacttcatcagttaatctatcatcacttgaaataagttcaaatgctttagttaataaagcatcacctgctaatatcgcagtccactcaccatatactttatgatttgttaatttccctcgtcgataatcatcattatccatcgctggtaggtcatcatgaataagtgaatatgtatgaatcatttctagtgcaattgcgctcttcatacctaactcatactcggtatttagtgaatctaaagtgagtaataacagaactggtcggatgcgtttacctccagcatttaatgaatacaacatactttcttctagctgagtatccattactgatttatttatcgcaaccgataattcattattgacttcatctattaatttattcatcggtagattcgtcattttttacatcctcagcttcttcttttattaagtcattcacctttttttcggcattttttaaagttgtgtcacaagctgctgatagtttcataccacgttggtataaatctaatgattcctctaaagatactgtttcattatctaatttttgaacaatttgctctaattcttgcatcatttcttcaaaactttgcgtttctttagtcattattacaccttactttcgtaacttttgcatctactaagccatctttcattgttaacgtcaattgatcattttctgttaaatctttagtactcgtaatgacttcgtcttttttattaacaattgcatatccacgcaacattgtattagttggacttaaattgtttaagttttctactttatttttcaaatcatttttataacttaatatcttagaattcaataatttaacaagttggtttgtcaattgaagattattttgttgttcttgattaacactacttagtaacgcttttaaattatagcgttgttgcaacagcattaatcgatgtctctgttgttcaaaagttgcctgaatttgttgtttcagtctcttttctaaatcatcacgacgttgtatctgttgatcatacaataaagttggttgtttaaacttgtaatacgatgacaaatgttcaacatgtttacgttgttgttctaaatgtttcttgatgaaacgagtcaatgtaaactgatattgctgtatttgttgcagcaattcatattggtctggtgttgcaataacagcagcttgagttggagtcgcagctctgatgtctgcagcaaaatcacttaatgtaaagtcagtttcatgacctactgctgatataatcggtgtcttacaattatatattgcacggacgacagcttcttcgttgaaattccataaatcttctatggatccaccgcctcgacctacaataatggtatctacacctaaactatctgcatattcaattttttcaataatgtcgtcttttgctttttcaccttgaaccaaagtactaatttgtatttgttcagctaatggaaaacgactatttatcgttgaatggatatctcgaattgcggcacctgtactcgctgttaaaactgcaatttttttaggaaacttaggtattgatttcttattcgctttatcaaaacaaccttcttcagttaattttttctttaatgcttctaatttttgatataagttccctataccatctaattgcattttatttacataaatttgatagtttccacgacgttcaaaaacagaaacacgtgcttctaataagacttcatctccttctttaggttcgaagtttaatttagaagcactacctttgaacatcatggcacttataacgctttctttatctttcacattaaagtataaatgaccacttgaatgctttttgaaatttgaaagctcacctttaatcaatacagattggagatgtggatcttgatcaaatttatatttaatatatttcgttaaagctgaaacacttaaataatctgacatataacatcactcaattttatttttttatattactcaatacaccatttataaatttataatgatcatcatcactgaattgttttgttaattcaactgcttcattcattacgactttagcaggtgtatcactgtgtaatatttcatatgttgccattcttaaaataatacgatccgtttttaataaacgtgcaatagtccaatcttttaaataaggactaattgtctcgtctaatacaggttcgtgatctttaacgccagaaactagccaatgaataaattcgaagtctaaatctggattatcgtctttaataaagcttatcgcttcatttatcgttaaatcactgtccttcatttctaattgaaataaagtttgaaaagcttgcactcgggattctttacgactcatttttaactccttcaaacgtttgtatttttctttatttaattactgaattaggtatgacattacttttcaataacgatttgtgtaatgtgaatattaatttgcttaggttctatcgctgtcatattagaaattgaattaaaaattgacgtttgaattttgtttgcagtttttgaaatattaacaccatgttttaatgcacaatatacatctatatatatgccatcttctttactctcgatttttaaatcacggcttaaatttttacgactaactttttctaaatttgtttcttttaattcagcaaaatggccagtgatgccttcgacttccgaagtagctatacttgcaataacagatagcacttctggcgctatttctactttacctaattttgaatttgaataatcagttactttgaccatggattgacctcctattaaccttcatcattcataatgctattttgctctaaaaagtttgtattaaatttaccgcttctaaatatatcgttattcaataatttaatatggaatggaatagttgtatcaataccaagaaccacaaattcacttaatgaacgaatgccagccataatcgcttcatctcgtgtcggttcatgtatgattaatttcgctaccatcgaatcataatatggcggtatcgtataattagtataacatgctgactctattcgaacaccatatccacctggtgcaagatattgctcaattttacctggtgatggcataaagttcttgtaaggattttcagcattaattctaaattcaattgcgtgtcctgttaatttaatatcttcttgtttatacggtaacacgtcacccatagcaacttgtaattgtaatttaactaaatcaattcctgttaccatttcagttacaggatgttctacttgaatacgtgtattcatttccataaaataaaatttattatcatttaaatcatatataaactcaattgttcccgcattttcataatttacagctttcgctgcacgaactgcggcatttcccatttcacgacgtgtttcgtcatctaaaattggggaaggtgcttcttccactaatttctgcatacgtctttgaattgtacaatcacgttctcctaaatgaattacattaccatagctgtccccaacaatttggatttcaatatggcggaagttttcgatgaatttctccatataaagtccaccattaccaaatgcagtttgagcttcttgttctgtcattcggaagccagtttcaagttctttttcattacgagcaacacggataccttttccgccaccaccagcagtagctttaatgatgaccggataaccaatttttttagcgattttcttagcttctgagacgtctttcattaaaccgtcactaccaggaacaactggaacattagctttgatcatttctgccttagcaacatctttgatacccattttttggatagattgataacttggtccaatgaacttcaattggcatgcttcgcataattctgcaaagtcagcattttcagctaaaaagccataacccggatgaacgccatcacaacctgtagaagttgcaatagataagatgttcggaatatttaaatatgaatctttagacaaagtgggacctacgcaatatgcttcatcagcaatttgagtatgtagcgcatctttatccccttcagaatagattgcaacagtttggatgcctaaatcacgacaagcgcgaataatcctaactgcgatttcaccgcggtttgcaattaaaacctttttcattatttcaccttaaataacggttggccatactctaccatttgtccgtcttctactaagatttcaacaatttcacctgaaatttctgcttgaatttcattaaatagtttcattgcctctaaaatacacactgttgtttcatttgaaacagtgtccccaacttgcacatacgcttcttcgtctggagatggcgatttgtaaaatgtacctaccataggtgcattaattgttttgtgattatctgaagttggctttggagcttcagttttattgctatcagttgattgtacttgaggcataggcattgccgcagcttcaactggcatttgtgagatttgtggcgtgataatctcagtttctttttctttcttaagcgtcactttgcctttagtatcttcaatattgatttccgttaaagttgatttatccagaatttcaattaattctttgatttctttaaagttcattattactgactccttcagtttgttttcatctacccgtctattttacttgagacaactcttcaattcaagcatgttcatattgctggcgacattatatgtctatcccaaagttataataaaaccacattttaaattaaaaacacttgtgtatttattacttaacattgactcatctttactcttaattaaaaaatttatgcattcagttaaacatatcaatgttatttttataagctattatgttttatcctcaacaatataatatgtagatatatacccttactcatgtctatgtttttttactaccaattagacgattcgttttatattttaaaaattatttttaaaataaaaagcctcatatcagcatataacctataatcattttaggcaatagctttatgagacttatttggaatatcttacgttaaatcagtatagtgaatacaagttatttgttaacaaattagagattatcctcttgaaatgtagcttccatcaccagtgttgataattaaaacgtcaccttcgtttacaaataaaggtacatttaatgtataaccagtttcaacagttgccgatttagtagcaccagttgcagtatcacctttaataccaggttctgtttcagttactgttaattcaacagttttaggtaattcaacaccgatagtttcaccttcgtatgtttgaatttgtacttccataccttcttttaagtaattcaattcttcttttaagtaatcacttgaaagttctgtttgttcaaagctttcattatccataaatacatgattatctccgtcagcatataaatattgcatgcgacgattttcaatcattgctggttcaactttttcaccagctctaaacgttttctcttgaattgcaccagttcttaaattacgtaattttgaacgaacgaatgctgaacctttaccaggctttacatgttggaagtctataactttccaaatagcgttatcaacagaaattgttaaacctgttttaaaatcattaaccgaaatcattcagtttcctcctcattttacacgcttatgttaaaactataaggtcttttgtgcatttagtaaagacttgacaaccattttctgtaattaaaatatcatcttctattcttataccgcccaaaccttctatataaacaccaggttctactgtaacacagttgttaacttgaagtttatcttgtatcgtacgagccagcattggcccttcatggatttctaaaccaataccatgtcctagtgaatgtccaaattcttttccatacccttttgactctaaatagtttcttgaaatggcatcagcttctgcaccagtcatgccaggtctaatctcattaattgctttcatttgagattcaagtactatttgatatatttctttcagtttaggatctggttctccaatagcaaatgttctagtaatatctgaacaatagccgttataatacgcgccaaaatctaatgtaatcatgtcgcctttttcaataattttatcacttgcaacaccatgtggtaatgcacctctatgaccagatgctacaatcgtatcgaatgatggtccatctgctcctaattctagcattttactttctaatattgcctttaattctttttcagtcatacctgcttttacaacagttaaaatatattcatatgtttcatcaacaatattagctgctttttgaattaaagcaatttcgtcagcatctttgacgtctctaattttatctacagtattagaaatgcttattaatgatatacggcttttatttaattcaaggtatgtatcataacttacatgatgcccctcaaaacctacattttcaaaattttcttggtgtagcaattctttaatctcaccaataatagtagatttacgattaataatttcataatttggcgcctgcttagttgcttgatcaatatatctaaagtctgttatcaaatattgtttatctttagatatgataagtgctccactggtaccagtaaaacctgataaatatcttctattgtaatccgaaagaatgataatcgcatctaaatgtttttgttctaaaatacgatgcacttgtgttattctgctcatcttattacctcctagtgaaacgtttgtgcatttcaactttatacattaaaataatatcataataaggataaaaaataatagatattgattttagggagatagtaatgaaaaaattggtttcaattgttggcgcaacattattgttagctggatgtggatcacaaaatttagcaccattagaagaaaaaacaacagatttaagagaagataatcatcaactcaaactagatattcaagaacttaatcaacaaattagtgattctaaatctaaaattaaagggcttgaaaaggataaagaaaacagtaaaaaaactgcatctaataatacgaaaattaaattgatgaatgtttcatcaacatactacgacaaagttgctaaagctttgaaatcctataacgatattgagaaagatgtaagtaaaaacaaaggcgataagaatgttcaatcgaaattaaatcaaatttctaatgatattcaaagtgctcacacttcatacaaagatgctatcgatggtttatcacttagtgatgatgataaaaaaacgtctaaaaatatcgataaattaaactctgatttgaatcatgcatttgatgatattaaaaatggctatcaaaataaagataaaaaacaacttacaaaaggacaacaagcgttgtcaaaattaaacttaaatgcaaaatcatgataggagtcttttaatgcgtaatataatattttaccttgtacttattattgctgcgattggattagtaatgaatctagatgcctttattttttcaatcgtcagaatgttagtcagctttgctgtaatagctggtattatttatctgatttattatttcttcatcttaactgaagaccaacgcaaatatcgcaaagcaatgcgtaagtataaaagaaatcaaagaagaaaatagataaaaaaatggaagcacttgtaggtaaaatagtctacgtgcttccattttttattctaaaaactactttctaaacatccattcatctgaacgatatttttcagttaattcttccacttctgccaattgagcttctgttaattcaagtggctttaattctatatttaaacctttcttaaaacctttctcgaaagctttttccatttgactaatagtaatgtgttcatctgaaatatcattgatggcaactgctttttcaacgaatgcctctttcatttttaattttaatctttcatttttataaataaacatatcaaacaattcgtcaatatcaatatcttgtaaaatcgaaccgtgttggaggattacgcccttttgtctcgtttgagcactcccagcaatcttacggccttcaacaactagctcataccaacttggtgcatcaaaacacactgaacttcgaggttgttttaatttttgacgctcttcaggcgttttaggtaccgcaaaataagtatcaaatcctaagtttttaaatccttctaataatccttgtgaaatcactctgtacgcttctgtaacagtagaaggcatattgggatgcgattcaggcacaatcacactgtaagttagctctttatcatgaagcaccccacggccaccagtttgacgccttacgagaccaaaacctttctctttaaccttatcaatatcaatttctttttgtagcctttggaaataccctattgataatgttgcaggattccatgtgtaaaaacgtataactggatcaatttcacctctagagacaaaatttaataacgcttcatccattgccatattataatatgggtctttacttcctgtattaataaaattccaagtttcagtcatattcaagaactcctatcagcaaaatgtataatatttgattcgctaattaatcaatttaactaaatgaataataatttcaattctttagtgaaatattttgataatttgacctaacagtcttataattatattatcgtttaattagggaggatgcaagatgagtgctagtttgtacatcgcaataattttagttatagcaattattgcttatatgattgttcaacaaattcttaacaagcgagctgttaaagaattagatcaaaatgaattccataatgggattagaaaagctcaagtcatcgatgttagagagaaagttgactatgactacggtcacattaatgggtctcgcaatattcctatgacaatgttcaggcaacgattccaaggattaagaaaagaccaaccggtatacttatgtgatgccaatgggattgctagctatagagccgctcgtattttgaaaaagaatggatatacagatatctatatgttaaaaggcggctataaaaaatggactggaaaaataaagtctaaaaaatagttttgtaaatttaatatacgatttaataaaatctgagtgttaattgatcatcaataacaatactcagattttaattttttaacaaagtctgttactatatttctctagcttcacagatcattaaacttagtttcagcataataaagaaagttcaactcattttcaatacgattcaattaccgcagtctaaaaagtgaaaagacaatttctatgaaagaataataccaaaccctaagagttattacttcggtttagttttctttttcaaatagaaattgtcttttttaattgattttaaaaccattatccttaaatcttcatacaaagttagaataataattctcggaatatgtgtttaatatcttatttttcctgtttaagattttcaaactttaatattggtttacgagcagctgtagcttcgtctaatcgatcaatcacagttgtatgtggtgcttctaacactttatcaggatcatttttagcttcttcagcaatactaattaatgtatcgatgaaataatcaagtgtttcttttgactctgtctcagtcggttcaatcatcataccttcttcaacatttaacgggaagtagattgttggtggatgtacaccgaaatctaataatcgcttagccatgtctaaagtacgtacaccaaattctttttgacgcacaccacttaacacaaactcgtgtttacaatattgtttataaggtatttcaaagtgttcagataaacgtgctttaatataattcgcattaagaaccgctgcttcggaaacctctttaaggccagttgctcccatagttcgaatatacgtataagctcttaagtaaataccaaagttaccataaaatggttttacacgtccgatagaatttttaatatcattatcatatttaaatttgtcgccatctttaataaccattggctttggtaagtaacttgctagttcttttactacaccgactggacctgaaccaggaccgccgccaccatgtggaccagtaaaggttttatgcaagtttaaatgaacagcatcaaatcccatatctcctgggcgaactttgtccataatagcgtttaaattcgcaccatcataatataatagaccaccagcattatggacgatttcacggatttccataatatttttttcgaaaatacctaaagtgtttggattagttaacataatagctgctgtattttcatttacaacacgtttcaagtcatcaatatcaacttcgccacgttcgtttgattttacagtaactgatttaaatcctgcaaatgaagctgaggctggattcgtaccatgcgcagaatctggcacaatgacttcatcacgatgaccttcaccattattctcatgataagctttaaatatcatcaatgcagtccattcaccatgtgcaccagcagcaggttgtaatgttacctcatccataccagtaatttcttttaattcttcttgcaaactataaataatttctaatgaaccttgaacttggtcttcatcttgtaatggatgtgattcactgaatcctggtattctagcaaccttttcattaattttagggttatacttcatcgtacatgaacctaatggataaaatccgttatctacaccgaaatttttatttgaaagttcagtataatgacgtactaagtctagttcagcaacttcaggaaactccgctttgtttttacgaataaatttatcatctaacaatgactcaacagaatttgttttaatatcacttattggtaatgaatatgcatatctgccttcacgagatctttcaaaaattaatggacttgatttactagtcatttaactcaccagccttttctacaaatgtatcgatttcatcttttgttcttaattcagttacagctattaacatgtgatttttaaagtcgtctgaaacaacacctaaatcaaaaccaccgataatattgtacttcactaattcctcgttaacttgttgaattggtttgtcaaatttgactacaaactcattgaaagatgtaccatctaatacttcaaaaccttttttaataaattgttgtttagcatagttagcatgttctatattttgaactgcaatatcatagataccttgtttaccaagtgctgacattgcaattgatgacgctagggcatttaatgcttggttagaacaaatattagatgtcgctttatcgcgtcgaatatgttgttcacgtgcttgtaatgttaatacaaagcctcgattaccttcatcatcttgtgtttgaccgactaatctacctggtactttacgcattaactttttcgtcgttgcaaaatatccacaatgtggcccaccgaattgagcaggaattccaaatggctgagtatcacctacaacaatatctgcaccaaatgaacctggaggtgtaagtaatcccaatgctaatggatttgcatatacgataaataatgcttttttatcttcaataaagctatgaatcttttcaagatcttcaattgaaccgtagaagtttggatattgaactgcaacagctgctgtatcgtcatccactgctgcttctaattttttcaaatctgtaacagtgccatctaaatcgatttccactacttcgaattccttacgcgtcttagcataagtatgaagtacttgtaatgcttgataatgcaaaccttttgagactacaattttatttttctttgtttgactaaatgctaaaatacatgcttcagcaaagctagtcatcccatcatacatagaagaatttgctacatccatatctgttaattcacaaattaaagtttggaactcaaaaatggcttgtaattcaccttgagaaatttccggttgatatggcgtatatgctgtgtaaaattctgatcttgaaatcatagcatccacaactgatggcgcgtaatgatcataaacaccagcacccaaaaatgatgtatgcgtttctttagtgatattcttgcttgcaatgcgatttaatcttctaagtaacgttgtttccgcttcgctttcagcaatatttaaatctctatttaataaaatatcacttggtacatcaccgaataattctcctatagattttgcaccaattgtttgtaacatttcttgcttgtctttttcagttaaaggtatataacgatgactcacaatgcacacccctttttaattatttatcaatttgatttttcttaacaattttcgcttttaattgacgcttacgaacttgaacaagcaactctctacccatttcaaactcatctctttttatcattgcaagtgcaattgattttcctgatgatggagactgtgttcctgaagttacttctccaataatatttccatctaaatccataacttcataaccagttcttgcaattcctttttcaagtaattctaatcccactgttcttcttggtgcaccattttctttttgatcttttaatacagatttaccaataaaatcagcatcaattaatggtttacttgcaaaagcgataccaccttcatatggtgtaattgattcagttaaatcttgtccatgtaatggcaatccagcctctaatcttaatgtatcacgagcgcctaacccacatggcataacattatactctaataaaccatcccaaattttttcagtatcatcgatattacaataaatttcaaacccatcttcacctgtgtaacctgactgagataaaatgacgttagctccaaataatttgacatcctgtttaaattcaaacattttcatttcagttacatcttcatcaactaattgattaattaaatctctagcttttggtccttgtattgctaattgaccatattggtttgatacattttgtacttcaacatcaaatttctctttgtgttttaaaatccaattaaaatctttttcagtattagcagcattaacaactaataaataattgtcgtcagctaatttatatattactaaatcatcaataataccgccttcttcattacataaagcagtatataatgcttttgaagtagttaaattatcagtatcatttgataataaatattgcacaaactgactagcatctttacctgtcacttcaatttcacccatatgactaacatcaaacaggccaatttcgtatcgaacagcattatgctcctctttaatacttgaaaattgaacaggcatcgcccatcctccgaattccacaatttttgcacctctatcaacataattttgatataaaggtgtttgttttaaatcacttgacattgaaatacccccttaaaattataaaaacaggatagcaatcgctaccctgtttataaattaccaattcaggaacgcgttacagtattatccttttgcctgagagtttcgtaataattacttgcaccttcggcgatagagtcttaacgctctattctctctaatactgatcactcgcttttattaaatttagcaattcataatatatttctgaaattgatagcaaatgactatcgaatttcttgaatgcgatttcattatatcttaaaatccgcgagcaatacaagtcatttaactgcttgattgtcttattatttgcattaggtcgatgtgggtcatcattgattcgactatatataatatcaatattacaatctaaccaaataatgtttttttgatttttcaaaaaattaaatgcctcttcactttcaataataccaccaccagtagcaattatatctgcagtgttaatacattcttgcaaacatgtgaactctaaattcctgaaatattgttcaccatgtttactaaatatttctggtattgttaacttatacttttcttcgatatatgaatctatatcaataaatgataaattttgctcatctgcaacgtatttaccaatcgtagatttaccggtacccatgaaaccaattaaaattattggtgatttatcatgattcatgcgttttcccttctttcaataacaaaacaatcttatagttatagtcagtttcaatattatataatgtctttaattttaaactatattgactgatataaaaagtgaaaatggaaaaataaattgctgttagcatcaataagaacggcgtaacatatcctttttctttatataaatcaaaattaataaattatttcacatcctttttaatagtactcatttaaattctagtaagttatgcataaatagttttagtctgcacatttgtaccgactttaactgttatcgttattttaataatggatttatagtagatatttgcagtaaatgctgtaacattattaagcattgttatatttcctctgtcatttacaactttaataattttgttatttattaatttgtattcgatcatttcttcacctttatgtaaaatgatacgctgttgcctaatttcaatatcgtttctatctacacctttaaaatcctctagaatatctcttgagaaaaattcgaaatctacagttgttaattccctactttcaattagaaaagttttgctaagtctaattaagtctggaacaattagtaaaattatacttataaccatcatcgctactaacatttcaataagcgaaaaagctttgacattaatactgtatacatgtcttttgataagaagtggtattttttgaaatagcacaaatttgttggtcactttgcttaatatcatacttccctatagttacccccttcttaagttcttctttattaattttagatacagtcgtcaaaattactttagaagcatcaattgtttgtagtttatggtttatactcgcttgcatttgattcatcattggtatcaatattaatgtaatcaatccaataagcaaaaatccagccatactatctattaagaatgatcctttacacttatagcttttcataacgaattcttcctttttcaatatggaatattattctataaattgaattgttattatcaattgttatgctaccaaatttattgatattcccttttttatcaaaggcaataatatcaacttttgcaacattaattattttgcctacttttaattttagaaatcgtattttattattctctattactttaatagtgtcactgttttcataaaatctaacattgatatatccttgatttgctatagcttgcgacttaatataattcaattcagtaataagagaaatgatatttgcctcatcatctattactctaagattgcttaatcctttagatgtcattgtcaaaagtaaaaatatactgattaacatcattaccacaagcatctcaatcatagtaaatgctgactgctttctaatttgcaactgcttctccattactaattgttattgtctctcctgatttacatgtcttttgtgcttcttttataaaaccatctgcaattaagtcttcaatagacgatggatttctattatgtttcaatgcatacgcttcaatttgactattaaccatttttacctgtgcattacaacctgttgattgtatgtgagcagtttgtttagcaatatttggaatgattaaaattaataataaactgatgattaataacactaatagcatctctatcaatgtaaacgcttgagttttcttaagaaatttaaacatatattaacctccattattttatactttgcatcatttgaaacattggtaacataattactaaataaattgcgacaataaataaacctaaaatcaaaaataaaataggctgtaaaaactgagtctgttttatcgctttatcttctatttgttttactaatatttgcgaatataactttagttctacttcaagcttccctctcttttcaccttgtagcacaaacttaattaattgaggcttaaagcattttagtttttctaaaatttgaggtaaaccatatcccatttctgaataagttaataagtatttacctagaaactgtctaaatggatcactactatggttaatataaacgtctactattgattgaagcgtaataccatttttataaaacaacactaattcattagttacaaaataagttttaaataattggaaatagcctgatattagcggtagtttcatcacaaagtttatcttattgagcatatttaatttgttataaatcaacttcataataatagccaacatagatactattatgagcattactacaattattgtaggtaagctggtaatgaaaaacgacaatgttttttgaaaagaagatagttgaatattcatagaagtatataattgttgaaactgtggaattactgtgaggtttaatataataatcatagcaataaaaatagaaactagtattaaggggtattgcagtgtctttaacaatcgttgttctgactttctattcactttcatataatttacggtttcttctagaacgtctatgatattgccaaatctttctgccaaatatacttgcatgacgatagtatcgctataacctatcagtgataatatctgattgcatggtgcaccatttgaaatttcacttagaatggtggtacctaattgcttatttttatatgtcatttgaagatttaaaaattgaaaactttgatacagagtgaaaccatatttcaacaaattacataaatttgaaagtaaatcgatttgttgggccttacttaattgtcgcttcttagaatgtagtttaaatgtatttatccattgtagtttcacaaatgacacctgcttttgtcatatcatcaagtttatcttctaagttcttaaatgatgatggtaatgaatgattatgggaaaagaaatatcggagttgttgctgagatagaatttcacatactaattgtcgctgttgcttaatagtagttacaagtcgttggtttataattaagttagttgcctgtatcaattcttgtacagaaatgcccatttctaatagccttaaaatagcacctttacaatcagttgcatgcaatgtagtcagaacaaggtgaccacttaaactagcctgtataacacacttggcaacatctttatctctgatttcacctattaaaataacatcaggatcacatcttaaaatagctttaaacgaatttacatagttaatgccagctttatcattcacattaatttggacaataccaggaatttgcatctctacaggatcttctatagaaattacatttaaattcaaggctttattcgcgtatgagaccatttgatacattaatgtactctttcctgaaccagtaggtccactaaacaatagtaatccttgtttcttattcatgaggtgtttaaaatcattgaatttataagttgatttctgttgttgaaaaaattgaggtacaattctgattacacaactttcttggccaagtgacaatggtaaagttgatattctcaaaaaatatattttattgaaatggtaactatatcgaccgctctgtgcgacttgctgtgtagaaacatcaagcccagcttgaaacttcatataaactaataacttttgataaatgctattcccaatttgttcatactgctccaagttatcattaattctaaatttaatacttacttcatttttaactggaataaaatgtacatcactcgctttcatttctatcgctttattaattatttcttgaaatagaatcttcaaaaaaacacctcctacatataatcacgtaggaggtgtttttattacttcaatttaaccgtgtaaaaatggatttaattgttcatcatcaaccgtcgtatatggaccatgtccagggaataaaggtaaatcgccttctaattcaaatattttatcttgaatagaatcaacgagcgtttcataatcacctttatataaatctgtacgtccgattccattattaaataatgtatctccaacaactgcgaattcatcgaacacatatgttaaacttcctggtgaatgtccaggtgtgtgtaacacattaaacttaaatccttctatttctgtgctaccttcgtttaacttttcaggagttaccttacttgtaataattggcaatccatattgcttaaatttatctgccccatttttaacggggtcttttagaaaatcaaactctgcttcatgcatataaaccgggacatcgaatcgatcaactatatcatcgactgctccgatatgatcaaagtgtgcatgtgttaataaaatagcttttaacggtttatttatttggtttaattttttaataattttttcactttcacctgaagggtcaatcaggataacagctttgtcattttcgatgaaatacgtattagtatcaactaagcctaaagttaagcttgaaatcctcataggttttcaccactattttctaaatgtttttgtactgatgttagtttatcattcatttttctagatttgtctcgtcggtcatcaatacgtatatttgtacaaactctacttaaacctttatcaaaaggtaattcatgtatcacttgcacaacttctaatacatcgcttaattcaccttcaattagagtattcattggtgttaattgaaaatcaattttacccattgctttatattcttgaagttttttctgaatatctgcaatatatttactaacactcggaccttccgttccaactggaataacaaccacatcaacaatagccattattttaccccctctttatctaatacataggtcttgattaatcctgctgctcctgtaatacctgcatcattacctaatttcgcttgtacaatttcagtttcaaattgagcaggtgtaaatgttaaattatgatattctgttttaatattttcaattaaaataggtcctgcagtagacattcctccacctagaacgatatatttcggattacttgtaacactaataatactacataaatatccaatatagtttgcaaccttttcagtaatgaaaatacagaattggtcaccagcttttgccgcatcaaaaacagcttttgctgtaaccttattttctttaatcaattctaatatagaagatctaaacgtcaacttcggatagtagaagttaactaagttaacaacgcctgtcgctgaagcaactgtttcaatacatccagaacgaccacaattacatttaaatcgttgatcgaagtctgctctaaaatgacctatttctgcgccagagccattatgaccatgtacgatttcaccatttgaaataattcctccacctagaccagtaccaagtgtgatggcaacaacatcatcggcaccttcaccagcacctttgtgtttctcccctaaagcagctatgttagcatcattatctacatacactggacaatcaacgaattgttcaaaaatctcacgtacattaactttttctggccaatataagtttactgctccattgactgtacctttttcaaagtcaacaggacctggtacaccaatacctacgccaagtacatttgaaaaattataattattttcatttactttttcaacaaacgaatcataaattcctttcaaaagtgtatatcctgtactatcagatgtatcagtgtgaatagaccacttatgtaattgttctaattcaggtgtgaaaatacttaatttacaagtcgtcccgcctacatcagctgctaaaataatttttgtcatttctgttcattccttctctgattaattatcaacgtacatttcaaatattcttccttagataacagttcatattgatacaatgatgaaatctcctgttgaatcatttcgtacatatcttctggatttttaaaatatattagaaatccgtaacttttcaataactgttgtacatcataaaagttatttatttttcgactcatttgatttagtcaactctttttctaagttaatataatctgtatttttagggtcagcatttaatgctttacgcacatattttaatgctttttcatcatcatttaatgaacgatttgctatcgctaactcaaaatttaataaacctgatttaggaaacattctaagtcctcgctcccattctgtcataccttcagacttagaattgatagtagccataatcataccacttaaataatatgtttgatcatcggcataatttttatttattgtctgcttcacaatattttgagcattatcataattaccactagtcatatcatctttgatcaatttattataaatattatcttctttaattgtaaaaattctaatttgaagtgcaataaatataacaagcataccaattagtaaaatccaaaaaatattacgattcaccttatagtaatagccaattaaagttattaataaaccaccaatgaatcctccaatatgcgccacaatatttatatttgacataaacagagaaacaccaactaatatcactaacgcaattaataactgtcctaacatttttttgttaaatgtttttgaaacatacatcatcgcaaaaattgatccaatcagaccaaatatagcaccactagccccaactgaaattgtagtcgtattaaatgatagtgatacaaagtttccaaacagccctgcaataaagtatacagttaacatcctccatgaaccaataattgcttcgactattttaccaaaaataaataatgaaagcatattcataagtatatgttcaaaactaaaatgtaaaaacatcgatgtaacaattcgataccattcaccatgtacgacattaaaatgcactaacccgccaacatctaataattttacatccgaaaaattatttaaatataaaatcatacataaccatattaagacatttacaaatattattgtgtatgttgccggtgaaaatttctgcatatatttatctaaaaagttatcggttaatactttgcgtttatagaacatatatgtctttttatcattatcttctgaaataagtctagccaaaaatatattcggcatatgctttatcaaatcttttgtgtgtcttataacattgaatttaattctaattggcgaaacttcatttaattgttcttctgaaaattccgattctgtaaaataataaaattcaaaactttgtggttcgaaagaaataaaatttgctatttcatctttgtgttcaagcacttttgctttgtcaaaacgtatttcttgggtagacttaatatgttgtttaaaaatgactacttgtttttttcttttatgggctaaccaaatttcttgatcatctttttccctactgacaatatcaaaattcaagtacctaatccaataatatattgttttccaaaattgtttgtctatgttcatttagtcctccactatgctgattgatatataatcaatttatcgactggttgatcgaatgattccggttcaaatgatgttatttgaaaatcgtataataagcttattgtctttgtctgataattagctaaaaacctgtcgtaatagccaccaccatacccaattctatatccatcgttttgaaatccgacaccaggaacaacaattaaatctaggttattcgttgtttcaccttttgaagttggatagtaaatccccttattatcgacatcaatatctttgagattaaatatctctttaaaagtcatttgatggtttaaataatccattttcggtacaaaaatacgtttatgatccattaaggcttgttcaattatagaaaaagtatctacttcatgattaaaagaaagaactagcgcaattgcgtttgcttctttgtattcttcagttgaaaaaaattgatttcttaaccatgtgtctgcttttcgcttttcagctttattaaaattcttcattttatgtaaaatgtattttctaatctcatttttagtcacattatcacccactttattcaattctattatatcgttaataacaatacatgtcattatgttgtcatgatgaattatgcgacaattctaaaatttattatttcaattgaaaatcttttatcatttcatacgtgtgcacaattaaaaaggtgaaacctcttattttgagatttcaccttttttattgttaatttaaatttaattttaatgattattttgtttcacggtgtaaagtttgtttgttttcacgtgaacagaatttcttcatttcaacacgttctggattatttcttttgttcttagttgtaatgtagtttctgtcaccacattccgtacaagctaaagttacgtttacgcgcatggttattcctccttatcatttctaaatacgactttattattataccaacatctataatatttgcaaagttaaaattttacaaccatgcgctacacaatcgtcaggctaaattttatttgtctttgtctttatttttatcatctttacctaactgcttaaagtagtagttaattacatctctacctaagtctccacctgttaaccatggtggtggtacaggctgatttgtatatacaattgaaaacgctaattttggatcatcaattggcgcgtatcctatataagtagagttaactcttggctctccgttttggaacacttcagcggtacccgttttaccagcagtagggactactgtatctttaaaactaacatatccagtaccatctttatcattaaatgccattttgaatccttcttgaatttgtttgatttctttttcagtattattaaccttgttcaagacggtgccattaattttcttcttgagtggaccaacctcatctttattagttgattcatgaatcgttaatccaatgtgtggctgtattctataaccatcattcgctatagttgaaacatattgtgataattgtaatggtgtataggtatcatattgaccaattgataaatctagataattacctggattatttgttaatggttcgatttgacctcttgtttcatttggtaaatctatacctgttttcacacctaagcctacttgatttaatcctcttcttagcttttgggcaggtgaacttatgtctgaaggtaaagccatgccagaataataagggtctcccgctaattttaatgctgttttaaacatatatacgtttgatgaatgcatcaaagcttgcttatcattaatagatacatgcccgtttttattaaagtatgatcgttttgtcaaaccaccttggaaatgtaatggttcatcgaccattgtttctccaactttgatagctttattctgataaccagctaataatgttccaccttttacagaagatccaaccgcaaattgagaagtaaacgtaccaatgtcataatcagtcattttaccactcttattaatctgctttccggcaagcgcaagaatgtctccatttttaggattttgtacaaccatcatagcattatccatatcttttgcaccttggctgcgaagcttcttaatttgtttatctaataatgcttctacttctttttgaagatctatatcgatcgttaatttcaaatcttgaccgcgagcgccaggatttaacacttctgaagatgtaactttaccagatttgtccgttgtgtatttcatttctttcttcttaccacgcaatacatcttcatattgatattctaggtaagattttccaacacgatcattgcgtgaatatcctttggataagtaatgttctgtcaattcttttggaataccttcagcaggtgtcgatacatctccgaatatacctcttaaagtgtcgccatatggatattttctatcccaatccatagacgtgttaacacctggtaatttggaaagttgctgagaaactgctgcatactctttttcactgacatcttcattttttatcatttgtggatctaaaactgttcctgcattcatctctcgaaaaatggctaaaacttgtaaatctttagaagacaattcatctaattgtgattttccgattttcgataacagttgtttatcatattgatcttgtttaatacttccatctgctaacatagcttgttcttttgtcatcattgcttttgcttttttaggatgcaactgaatccagaaatctttcttatcacgttctgtaatcttcttagtatccatcttgattagcttcgataacttttcagccgtatccaacatttccgattgtgttgtttttcgacccctagtatatgtaatagccattttagaagcattatcaactaaaactttcccatttctgtctaaaatacgacctcttggcacagactcattcactgtaatgttttcatcattttttataatttgtttataatgtgagccttgtgcgatttgtaaataacctaaacgtagtactagtactgcaaaaataaatacaatcacaccaaatataaagttaattctcttgttaattgtattttgaacgatttcatcatttgatttttcttttagtctttttaacaaaactacctacctctattcaaagtctttcactttaaatcatatatgaatttagaaattatttctatctttttgacaaaaaaataacggtctcatttaagagaccgaacaagtaatcatactttattttgttgcattatataattcgtcaactttttcccagttaactacattccaaaatgcgccaatgtagtcagggcgtttgttttgatattttaggtaataagcgtgttcccatacgtctaaacctaaaataggtgttttaccctcagttaatggattatcttggtttggtgtagtcacaatttctaactggccattgtttacgactaaccaagcccaacccgaaccaaagcgtgcagctgctttgtcagcaaattcttttttaaattcttctaaagaaccccattgttctttaattttttctactacagtacctttttcttctgagtttggtgaaagtaactcccagaataatgaatggtttaaatgtccaccgccattattacgtacagcagtttggatgttagctggtacactgtctaaattagcaacaatttcttcaatagatttagattctaaatctgtaccttctactgcagcatttaatttcgtaacataagtgttatgatgtctgtcatggtgaatttccatagtttctttgtcaaaatgtggttctaatgcatcaaatgcgtatggtaattttggtaattcaaaagccataaataatcatcctcctaaaatgtctgtaagtaaataataacaagcagtgactggttcaacaaagaatttgcttaaattctactacttattattttctctactcatttaatataactcaaatcaaaaataattaaacattttgtatataaaaagttaacagatttgccataaaatcatacgaacggagtatgaaatgaacctttatcttctataatttaaaaaaatgagatttatgcatacatctgaccaaatgtgcataaatctcatttctttatattaatcttggcaagactcacatacaccataaacttcaagtttgtgtttgtgaatattaacaccaggtagtgataattttatctgatctattggacaataatctattacctttgtatctccacacttttcacagataaaatgatgatgatgatggtttgtacaagcgattctaaacttcatttcaccatcaagttctgtattttcaataatccctaaatctttaaataagtgcaggtttctatatattgtgtcgaatgaaattccaggataattttcatccataacttgttgtatatactttgcgtttatatacttatcttcttcgacaaaaatatctaacatatctttacgtttatctgtatattttaaaccgttctcttttaaaattttaatagcatcatttgtattcattgatattagctccctttttaaacttcattcgcattttctgataagccattgtaatcataagtaaaataactagtagaactacaattacaccacccggagaaatgtccatatagaaagctaggactaagcctaatattactgataattcacctaaaaatacacttagtaatatcaattgcttaaaactttttgttattctcatacttattgcaattggtaacgtgattaacgcacttactaacagtatccctacaacacgcattgaggcagaaataaccatcgctacaataacaataaataaaaattgaatccatttaggaatgccaatgactttactatattcctcatcaaatgacaatataaataattctttataaaacaatgtaataaacagaacaactatgatggcaatgacaataatcgttgttaaatcacttatattcactgcgcttattgagccaaatagcaatccaacaatttcttgattgaacccatcagctaatgaaatgaagattgcactcaaggcgataccagcactcattataattggaatagcaatttcttggtaagcagtgtatgacgttcttaatttttcaattagaagcgcacctactattgcgaataagattccaaaccacattggattaataaatactagtgttggcataatagtaagtaaaaacataccgaaagatataccacctaaagttacatggcttagagcatcagctataagtgatagtcgtctaacaacgataaaagcaccgattagaggcgcaataaaacctatcaagataccactaattaaagagtacctcataaaatcaaaattcaataatgcatctatcaattgtgacacgcctttccattttaaataaactcaaatctttattaattacaacattctcgattatgctgatgatcgacaaaacgtacaggatgtccataaatttttgaaatttcaacttcatcaagtgatttaaactcatcagttgtaccatggaaatgcaaatgcttatttaaacatgctacttcagtagcagtatctgctacaacaccaatatcatgagtaactaagataatagtgataccttcttgttttaattgatctaaagtattataaaattcacttacatgttttgcatcaataccattcgtcggttcatcaagtactaatactgcaggttctgaaatcaatgctcgagcaatcattacacgttgttgttgaccacctgataattctgctatatttttatgaattaaatcacttatattcagtctttctagtactttaatcactttttcattatctttgttattaaatgtttggaaaagacgttttgtctttgttaatccgcttaaaacaacttctttaacacttgctgggaaacctgaattaaaggcatttgctttttgtgatacatagcttaatttaattgatgttttcttatttttaaaatcaataccttcaacaaaaatctcaccactttgtaaaggtaataatcctagaatcaacttcaataatgttgatttaccagcaccatttggtccaacaattgctaaaaattcacctttatttattttaatgtttatattttctaacacttttttatgatcatagtagtaattgacatttttcaattcaaagactggtgtcatcgtattctcacctcgcattcaactatacaactcctagtaacatatgtaaacagtaatgtttacgactcaaaattagacaaaataaagagatatgcccccttcaagttttatttatcgcatttcttgaagagagcattatcattttattgttgcataaccttattttttaaatctgggtcaaattgctgttgttttaacatttcaatttcaagtttatatggcggttttttatttttcttatcttcaccaacataaggtgtttctaagattttcggaatatctttaaaactatcatgatgcacaatgtaatttaatgcatcaaaaccaatgtaaccgaagccaatattttcatgtcggtctttttgagcgccacggtcatttttagaatcattgacatgaacaactttaattctgtcgactccaatgattttatcaaattcatttaatacgccatcaaagtcctctttcacattatatccagcatcatgcgtatgacatgtatcaaaacatactgataaacgttcgttattatgaactccatcaataatacgtgctaactcttcaaacgagcgaccaatctctgtacctttacctgccatcgtttcaagcgcaatacgtacattattgtcattcgttaaaacttcatttaatccttcaataatcttattaattccggcatcaacaccagctccaacatgcgcacctggatgtaatacaatatctttagcgcctatagcttgcgttctttcaatttcttgttgcaagaaatctacaccaagattaaacgtttctggtttggttgtatttgcaatattaatgatgtatggtgcatgaacaacaatattagataagccatatttttccatcacttcatgacctttagttatatttaaatcttcaatacttttacggcgcgtgttttgaggtgcaccagtataaatcataaatgttgtttcaccatattcatgcgcttctatagcagaaccttctaacatctttttaccactcattgaaacatgtgatcctaataacataaaacacacctaaccttttttgttttgcttacgtttttgtctattttgctgcttactaaattgtttacgctcttgacgtttcattttttcaacttcttgtttaaatttcttcttataacctggtttaactttgtttttaattttacttcgaactttgttcttcacttgattagttaaatggtcatctttgcgcattcttgcttgacgctgattgtgcgctttaacttcttttaactcaccatctttaatatcaacagtattgaaaacaaaacctcgatcttctattaatgaaatattgtgttcttcatcaggactataaagcgtaattgctacacctttataattcccacggccagttcggccgactctatgtgtaaagaagtcaatatcatttggcacatcaaaattgatgacatgactaacaccttcaatatcaataccacgagatgctaaatcgctggcaataacgtattggaattctaaattacgtatacgtttcatttgttgtttacgttcacgtggcgttaaaccaccatgaatcataccaactttaataccagcttcatttagtgaacgtgctaaatcatttgcattatctctactattacagaaaataatacataagtatggatttagtatatcaattaaatttaaagtcttttcaactttagctgcacctttagtaggtattaaaaagaattcgatgttctttttattttgttttttactgtcgacagctacatattctggatgacttaaatatttatttaaaaatggttgtaactgttgtggaattgtagcactaaacaccgcaatatttgcattatcttccaatcttgcagcaatgtaatctacatcttcaattaatcctaagtcaatcataagatccgcttcatcaataactaaatatgatgctaagtgcacatgtaaatgtcccgttttagctaagtcattaattctagtaggggtacctataatcaattgtggttgtgcattacaacgttgtctatctttctctatatctgtaccaccaataaaaactttaactgaaacaccagctttaaattggcttaaatggttcgctgcatcgtatagttgttgtgcaagttctcttgttggtgcaactacgattgcttgtggttcttttatttcactatcaattaactgcattaatggtaataaaaatgcatgagatttccctgtacccgtttgagattgaccaattaaatttgttctctttagtattcttggaataattcgattctgaatttcagttggtttttcaaaattaaggtctttcacagcgtcaattaaactagattctagattaaattgttcgaatggatgttttgccatgatttggcctccttatatgttcatctttactattataaagtataaatgtgctattttaaataaaaatattaaaacctcgaaatttcaaaatttagaaatcccgagattttagtttaaatatattgaaatggatctgtattaattgtagatgcttcaacatctatatttattttttctgtattgaaccaattcattagtaacgtttttaaaccttctttcatcacatattcgctgtaatgattaatatcaattaagttcacaccatgaattttagcatctaaggcatcatgatgtttaatatcacctgtaacaaagacatctgcgccttgttgaacagcttgatattcatatccaatacctgaaccaccaataattgcaatacgtttaattttctgattagactcaccaacaaatcggacacttgggatatttaatttagatttaatatcagctgcgaaatcttccaatgtcatttgattatccacttctgccataacgccaagtccataaagggatgtttgttttatctcaataaaatcaaataccggtgtttcatatggatggtattgtttaattaattgctcagcccttgacttttgacatgcatctatcataaattcaattttaacttcatctacatattcaattttatcaatttgtcctattgttggattagcttcaccaactggtttgaattgccctcttccttcactttcaaagaaacaatattcataattaccttcttgtgctaatccattttcactaagcttatctttaaatggtccaacattatccttaggtatatatgtttgaactttatagtatacatcttgttgattatttattattgaaatgttcttcaatcccatcgccttcgccaacatcatattgacaccatgaggatttacatctaaatttgtatgcatcgctattaaattaatgtcatgttgaattagttttctaataattaaaccataaccattagcttttaatgatgttacacctttaaagattagaggatgatgactaataatagtattataacctttttcgattgcttcatttactacttccaacgtacagtctaatgctgttaaaacaccagtaacttcaacatcttcatcacctattaacaatcctacattatcccaagattcagcagttctaaatggcacatgatgatctaacaatgtcattaaatcagctattttcattactataacaccctttcaattacagcaatttcgtcattaatttgagctaaacgttgatgatgttgttcagtattgagtttcgatttaatatgataaagtgcttctaactctctttgccatttttttataaaatattcatttttgttgttcagcaattttggtccgaatttcaattcatcagatgatagctctattaattgcgtagaatattctgctacaacaatttcataaatatggcctttttcttccattattatttcatcaattatttcataattcaattgttgtaatgtttgtcttaaattttcagtttggatattactttgtaaaatcaaccttggatgttgacttaacttatcttgcccatcttttaaaattttagcaataagtggtccgcccataccacaaattgtgatattatcgattacgtcctcaggattaataacacttaagccatcccctaaacgtacatcaattctttctactaattgatttgcagctacatttttcacagcagcttgaaaagggccttgaataacttctcctgcaataccataatcgcataaatggttttgaattgcatagattggcaaataagcatgatctgagccaatatccgcgattgtaccttgttttaaaaatcgacttaccgttgttaatcggttatttaacgaaatcattttattctcctttatgaaaaaagaggttgaacattattcaatgtaccaacctcactcaagttaaatcttaatctaaaaataaataagcgcttattcatgtcttggtatcaatcattaaaattgatataaattaatccataaagtctttcaaacgtttactacgacttggatgtcttaattttctaagtgcttttgcttcgatttgtcgaatacgttcacgtgtaacaccgaaaactttaccaacttcttcaagtgttcttgttctgccgtcatcaagaccaaatcttaatcgtaatacattttcttctctatcagttaatgtatcaagcacatcttctaattgctcttttaataattcataagcagcatgatctgaagggctttgtgcttcctgatcctcaataaagtctcctaaatgactatcatcttcttcaccaattggcgtttctaatgaaactggttcttgcgcaatttttaaaatttcacgaactttttctgctggtaaatccatttcttcaccaatttcttctggtgctggatctcgacctaagtcctgtaataattgacgttgaacacgaattaatttattaattgtttctaccatatgcacagggatacgaatcgtacgtgcttggtcagcaattgcacgagtgattgcttgtctaatccaccatgttgcatatgttgaaaacttaaatcctttgttaaagtcaaatttttcaacagctttaataagacccatattaccttcttggattaaatcaaggaataacataccgcgacctacgtatcttttagcaatacttacaactaaacgtaagttcgcttctgcaagtcttgattttgctacttcatcaccttgttcaatacgtttggctaattcgatttcttcttgtgcacttaataagttaacacgcccaatttctttaaggtacatacgaactgggtcatttattttaacacctggaggggcactaagatcacttggattcagtttctcgtcagtatctgaactatctttttcattaactagtgaaatatcattatcatttaattgatcaaagaaatcatccatttgatcagagtcgatatcgaaattctgaagtttttcagcaatttcttcatgacttaaatgaccctcttttttacctttttcaattaattgcttcttaacatcttctaatgttaatgtcggatcaattgtttgttttttaattttaactgtgttatcagacatgaaacggcctcccgattttaaatatgaacattcgaaatttattcaatattgctattttaaactaaattcttaattaattcatccatatttttaattttattttacaaataggaactaatcccaatatttatttttcaatagtgttgtttaaatgcggtaactatcatttacccttatacattttgacataatcattattcgtattattctttaaaatcacatgctacatgcgttccttattcttagcaacaatttgctgtaaatagtatttctgtaattctacatcgccaatccttgtagcttcccttaatttatgattcaatgactcaattgtttcttgtccgttttcattaataacattgacataatcatcaatttcattttcatatggttcatcattcaaactatattgttctaaactaattagtgtttctctcaactcatttgaattaacatactgcacagcatcactgatattatattgatcattttccgcataaaaatcatgtaagacttcgaatacatatttaaaatgctgatttgtgaagttatccttatcaacactttcataataatttaaaaatgtatctttatctctcattaaatgttttaaaaatgctcgctccgctttttcttgacggctcaaattgtcaaattgtgccataccaattggctcaggttcaatataaccgccatactcatcttctggataataattggctggtgcttgattgaattgtatttcgttagctaattgctcaggactaacattgaaaaatggcgcaacatcatttatagccttttgttgtagaattgatgacttcataagtgaaatgtcatgactcagttctttcaaataacgttcatatgaaaggtcattatgtgcaatttcatcttttaatatactcactttataatgtgcaaatgactttttgtcattttttacaaaagcagtaaatgcgtcgttgccatacttaccaatgtattcatcaggatccatgcctgatggcaattgtataacaaatacatttagcccttgctgtaacaaatgttgacctgttttaagtgttgcttcactacccgcaaaatccccatcaaacattaatgttatatttgatgttaactttcgtataaaggtaatatgttcatctgacaactgtgtacccattgttgcaacaacgtttttcaagccagcagtatcagattttataacatccataaaaccttctagtaatacaatttcatctaattttctaattgatttacgtgctttatctaagttatataacaactttcttttttgaaagataggtgtttcaggactatttaggtattttggttcttgaccggtatatgttcgacctgaatatccaacaattcttccttgcgcatttttcaaaggaaacataatacgatttcgaaatctatcgtaataactgaagttttcttcgttacgtgataataatccggcttcatatgctaattcaatatcgtaaccctttttttgaagaaaatcatgacaaaaatgtgagctatcgggtgcaaagccaatgcctcgctctttaataagcgcatctgtaaaaccacgttcttgtaagtatgttaatgcttgttcgccttcgactgtctttgttaaagcgtaataataaaattcttgtattaactcatgcatttcaatcatttgtaaatcatcagaagcaatttgaacatttgagttagattgtgttgcctcaatatctacagcaacattaactctatcacctaattctttaaccgcttcaacaaatgatatgtctttaatttcttgagtaaattgaaaaacattgccaccttttttacaaccaaaacaatgacagatttgtttatcttcagaaactgtaaatgaaggtgtcttttcatcatgaaaaggacacaaacctatataattgcgtcctctcttttctaattttacatattcacttaccaagtctaaaatgtcggttttatcttttatttcattaatgatcgattgatctattcgcaaattaaatcacctattaagcattagttatactattatacctaatttttgacaaaaatgaaatcatttcgatttattttgttcaatataatggattatatcgttcgctgtttcttcgattgctttttgagaaacatcaatgacaggacatccaatttcacttacgatttcttcaaagtaattcaattcttcttggattcgagcttctgttgcataacgagctgtgtcacctagtcccaattgttttaatcgctcttttctaatgcgatttaatttttcttcacttattttaagtgcgatacatttctttggatcaatatcatataagccatctggcggtgtcacttctggtacaatcggtacattcataactttgtaactcttatgcgctaaatactgagataatggtgtctttgaagttctcgaaataccaagtaaaacaatatcagctttaggtaatcctttaggatctttaccatcatcatatttaactgcaaactctatcgcatcaattttcttgaaatatgcatcatctaatctatgaacgatacctggctcattataaggtttttcttcaaccgatgctgataataaatccattaatggccccataatatcgacggacttcaattggaattctgctactttctcactcatatattgcttcatttcaggtttaataagtgtataaacaatgatagcatttgtatctttagcaacttgaatcacttcatcaacatcttcaaaagattcaatatacggatatcttaataattcatttttacattgcttaggattaaattgtgaaatacctgccctagcaactaactctgccgtttcacctatagaatctgaggctacgataattttaattttttccattacttctcacctattctttatataatgctactaataacttagctattgttgttttggaaattcttccaattacttcatacttttgattatctttttttcttacaattggaatcgaatcaatttctttttcaatcattctatctgctgcgtatatgactaattcgctttcctctaaataagtgacattaggcatacgtgtcatatttacactgataggtactgtatgaatatctgctccaatcattgaagctcttaataaatcttttcttgaacacacaccaacaaaatcgttatcttcattaataataaataatgtacttacatcttctaaaaaaattgtacaaatagcgtcataaactgttgtattctctcttagcacaacaggttgagacatatagtccttaacctcaaattgtcgaagtttttcattaaaaaatttaccttttgatttacctgaataataatatccaactcggggacgcgcttctaaaaaacctgacattgttaatatcgctaaatctggtctgagcgttgctcttgttaaattcaacttatctgctatttgttcaccagtaatgggtccttgagttttaacaatttcgatgattcgttcttgtctttgactgagttctataggtcttcaccccttttttattcacttattattataccgatatttctttcatgtcacaaacacattaattttacttgcctttaaataatctatcaattagaataaacgtacagcgagttaaggatagtgtaagcttaacaataagattggcgcaacgaatcattttaaaataaaagcgagtgactacactaatttgggtggaaccgcgggttaaatacgtaacttattttgtattatatacaatttaaaatattaactcgtcccatggaagtaaagcatatttactatgctgttattttccatggggcgttttcatgtatgaggagaggtaattatggcaaaagatatggatacaattgtttcattagcaaaacacagaggttttgtgttccctggtagtgatatttacggtggtttatcaaacacatgggattatggtcctttaggtgttgaattaaagaataatgttaaaaaagcttggtggcaaaaattcattacacaatcaccgtttaacgttggtatcgatgctgcaatcttaatgaatccaaaagtatgggaagcttcaggacacttaaacaacttcaacgacccaatgattgataataaagatagtaaaattcgatatcgcgctgataaattaattgaagattatatgcaagatgttaaaggtgatgaaaacttcattgccgatggtttaagttttgaacaaatgaaaaaaattattgacgatgaaggtattgtttgtcctgtaagtaaaactgctaactggactgaaattcgccaattcaatttaatgtttaaaacattccaaggtgtaactgaagattctacaaatgaaattttcttacgtcctgaaacagctcaaggtatttttgtaaactataaaaacgtgcaacgttcaatgcgtaaaaaattaccatttggtatcggtcaaattggtaaatcattccgtaatgaaatcactccaggtaacttcattttcagaacaagagaatttgaacaaatggaacttgaattcttctgtaaacctggtgaagaaatcgaatggcaaaattattggaaaacttttgcaagtgactggttaacaagcttaaatatgaacagtgaaaatatgcgtttacgtgatcatgatgaagatgaattatctcattactcaaatgcaacaactgatattgaatataaattcccatttggttggggtgagttatggggtatcgcaagtcgtacagacttcgacttacgtaaacatgctgaacactctggtgaagatttcagataccatgatccagaaacgaacgaaaaatatattccatattgtatcgagccatcacttggtgcagatcgtgtaacattagctttcttatgtgatgcatatgatgaagaaggcgttgaaggtagtaaagatgcacgtacagttttacacttccatcctgcattagcaccatataaagcagcgattttacctttaagtaagaaattatctggcgaagcgattaagatttttgagcaattaagttctaaattctcaatcgatttcgatgaatcacaatctatcggtaagagataccgtcgtcaagatgaaatcggtacaccttattgtgtaacattcgactttgattcattagaagataatcaagttacagtacgtgacagagattcaatggaacaagttcgtatgccaatctcagagttagaagctttcttaactgaaaaaacaaaattctaattaaaaagactctccaccatatgtggtggctatataatttataaaaagagatactggttagtaaaattgccagtatctcttttctattcgaaaaaggtattcaaataaacacatctatgtggctacttgaataccttttattattttatgttattgttccaatctttttaattggttgattagtttctgacttttaaaaaacatacctgcatattcacgatataacattaaaatgatttctgacatttcatcaataatttcttgatggatattcaatgaattcattttatctattggtaatttttgtaatacatctaataagtatagtgttttattcgataatataactgcatgtacatctttagaagcctcttgccttgaaatcgcaccgtcaaatttaaaactatagcctattaaatcagcttgtgtgtcattaccactcacagcacagcgattaaatgatgcggtaaaaccaaatcgtttcatacactttaacataacaacgactgacattaactgtgcagaagtacctgattctattttttcaagaacaaattgtaataattgatagttatatggtgcaatgtcaccttcatccattgagcgctcaatagtttcagctgccagagacgcataactgcttacgtaaaggtccatttgtaatttataatgttgactaataacatctacagaatttaacgttcccatacctcgccactgattgtaaataaacaaaccataaacaaacaattgcgtttgcgcttgtaaacccgtcttaacttttttagcacgccttgccataagtggtacttttgcaccatgctcatttaaaatcgtaataattttatcagattcaccataatcaactgctttgatgataatccctttttggcgcattaacaattatcttcaccacttttaagattaatcttggtcttcaacataaccaatttggcgaataaagttaactttgtttcgccagtctctttgaactttgacccataattctaagtaaactttagaacctagaagcatttctatatcacgtctcgcacgttttcctacttcttttaactttttaccgccttttccaatgacaattcctttttgcgaatctctttcaacatatatagttgcttcgatatgaacacgatcttcgctttctttaaccatacggtccacattaacaccaatcgcatgagggatttcttcacttgtaagatgaaggattttttcacgaatgatttcacccactacaaattgttcaggatggtctgaaatttgatcatctggataatatttaggtccttcgggtaaatacgtctttaatacatcaataaaatgatctacatttagcccttctaatgctgaaataggtacaatctctgtaaagtccatataactttgatattcttcaatctttggcattaattcatctggatgcactaaatctattttatttaatactaaaaatactggtgtcttaacatttttcaacatttctataatatattcatcgcctcgtccaatttcctcattggcattaaccataaacatgattgcatctatctcagataatgtatttttagcgactttcatcatatagtcacctaatttgtgtttaggtttatgaatacctggcgtatcaatgaatataatttgcgcatcatctcttgtcattacaccttgaattttatttctagttgtttgagctttatcggacatgattgctattttatggccaatcactctattaacaaatgttgacttccctacatttggtctacctataattgaaacaaatcctgatttatgttctgtcatttattctaaatcctttcctgaaaatccaaatggtagtaactctgcgactgtcatcataaccatatctcctttatgatttgtcatatacacaggcatatcatcatcacataattccttcaaaacttgacgacatgcaccacaaggtgatgacggtttatctgcatctacggttacagttattgattcaaaatcacctggtctgtatccttgagaaattgccgataccaaactagctcgttcagcacatatcgataatggataagaagcattttctacattggtaccataaaaagttctaccatctttcgtttttaaataagcccctactttaaaatgactgtatggcgaatatgattcttgttgtgcttttctaacttcttgaaaataatgaggttgataactcatatatgcctccctaaaataacgctataaaatgtggtaaaaatactattaaacctataataaatgctaatattgaaactataagtacactaaaagccgctatatctttagcgtatttagctaaatcatgatattcaacggtcactagatctacaacatattcaatagcagtgtttaaagcttcaacagttagaactaatgcaatagcaatgagtataaatatccactcaatcctattaatatttagtacgagaccaaagacaatagcaacaatcattgcaaacacatgtaaaagaaatttatagtctttttgaattaagattttcagcccatcaagtgcatatttaaaccttttcataattagtctcgtgttaatccatatgcgtttaatattgtatcttgtcgaccaaacatttccttttcatccgcttcagtcatatgatcataacctaatagatgcaaaaatccatgtaatgctaaaaatcctaattctcgttcaaaagaatgtccataattgtttgcttgttcttgcgctacatccgtacagataattatatcccctaaaacacgtggtatatcaagaccactaaaatcaatatctggctcatcttcttctaaagcaaatgagattacatctgtaactttatctttatctctatatgttcgattaatttcttgtatttcttgtttatctacaaatgtaacagaaagctcagcatcgtcttctatatgctcttcttttttagcaaattctaataaatcttcaatttgtttataccaagcatctttaactaagcctgtgtgatcgctaaaatctatcgtaaacatttaattctctccttcataatgttcaatgatcttacttaccaatggatgtcttactacatcgctctgatctaatttcaatatacttatacctttaacgttgtgtaacctactgaccgcttccttaagtccacttttaacacctttaggtaaatctatttgagtttggtcaccagtaactaccatttttgagccaaatcctagtcttgttaaaaacattttcatttgcgcatgtgtcgtattctgcgcctcatcaagaattacaaatgcatcttctaatgttcgtccgcgcatatatgcaagtggcgctatttcgataatgcctctttcaataaatcgctctgtttgttcacgcccaagaacagtatatagaccatcatataaaggtcttaaatatggatctaccttttctttcaaatctcctggtaaaaatccaagtgactctcctgcttcaacagcaggtcttgttaatacaatacgtttaacagcacctttacggagttgctttgctgcataaactacagctaagaatgtcttacctgtaccagcaggacctataccaaatactaaatcattatttttcatggcattaacatatatacgttgccccatcgttttcgcacgaatcgtcttaccaaatgcatctttagttatctcttcatcatataaatctaacagatgttgaattgtgttattatgcgccattttaatagctgcttcaacatctttaattgtaatattattacctaaatcaataaccttcagcaaattgattaatactgattccgctttttctacgttttctatttttgtacctttaacggcaacttcttgtcctcttgcatggatgacaacatcgaaactctcttcaattgcttttaaatgttcatcattatttccaattaaagcttgagattggttcatatcgtctatttgtataattccaggcatacacgcgctccttttcatatatcatttatattcattctatgatgctttaatatctacttaattatatcatgcaattgattgatttaaacatctttgcattgacttactcatttttctttaatttaaaatgatcatttatacttttcaccttgtcataaaagcagattcaattttagactaatcaatttttgttgtaatttaaataactaatatttctcgaaagattctctttatttttcaattattcttaacgtaaaaaaacaagcaactaccattatgatagtgcttgttttcaaaaaattttataattgttttggtttagctaaaatttctgaccatatcataccattgattacttcatctttatcaaattggaacgctgatttagtcaaatctttttcgacattttgagaattaagcaactgctttaatttcaaacgttttgtacgttcagataagtatttatcctcaataatatctctagcacttttttccattttagcaatttgcttttctttttctctatcaatgtcagtacgaatcgttttaatatcatctctaagtgatttttctaattgacgtctaatttcgtcagaattatcttgtctagaaggtctatgtttctgttccaccggttctgctttaggcactgtaattggtttctctgtcatcggttttgtttcatgttgttttttaggtgccataggttctacaacaggcttcgatttaggctcttcctttggaagttcatcgaataaaggtggtaacgtatcatcatattttcgtttcgatgatttcttttcttcttcatttaattcttcacttatttctttaaacgttcgctcaatttcttcaaaaaagccacctttttttggttcattatcggtagatgttttttgaggtggcttttgattttgtctatctttatgactattttcgcgcatagtagtaatgatagaaatgatcactgatatgacaaaaattagaataccgacactcatttaatcacctctcgacttaatgttcaggtgactcatcatcactatgatcagttcgtttattaattgcatttctcatgcctgtatcagcttcgatatttttcaaattataataatctttaacactgatattacctgaacgtaatgcttcagccatagctaatggtacttcagattcggcttcaactactttagcatgcatttcttgtacacgcgctttcatttcttgctcagttgccacagccatagctctacgttcttcagcttttgcttgtgcaatatttttgtctgctaatgcttgttcagtttgtaagtctgcaccaatatttttactaatatcaacgtcagcaatatcaattgataaaatttcaaatgcagtacctgaatctaaacctttgcttaatactgttttagaaatattatctgggttttcaagtacttctgtatgatgcttactagaaccaattgttgaaacgataccttcaccaacacgtgcgatgattgtttcttcaccagcaccaccaacaagtcgagcaatattagctctaactgttatacgagctttggctttcacttcaataccgttcattgctacacctgcgataaatggtgtttcaatgactttaggattaacagacatttgaaccgcttctaatacgtcacgtcctgcaaggtcaattgcagcagcacgttcgaaaggaagatcaatgtcagcacgttgtgcagcaatattagcgtcaacaactctgtccacatttcctcctgctagataatgcgattctaattggtttgttgttaatgctagtcctgctttatgcgctttaattaatggcgctataacttttcttggagatacacgacgtaaacgcataccaaccaatgtacctataccaacatgaacgccagctgctaacgctgaaatccataaaccaatcggtacaaatgagaataaaataagtaatgcaactactataataactgctattacgataaaacttaaactaaacatggtatcgctccttttaattaatctacttccctcacaactactcttgttccttcaacttcaaggatttttaccgttttattgcgtaaaataaagttgccatctgaaacagcatcaatacgttcattttcacaaaaaataatccctgctggtcgaagatctgtaactgtttgagcagtctttcctacgaggtgcgagcggttatcatgagaattgtaacctgactcagaattagttgaatcttttaagataactttatccaaaaacggaatctttctgttgaaaatcttcactaatatcacccattctacaatcgttaaaatcaaggcaacgataacattcgcaagcataaatagcaaattatcaccgagcgttgttatgcttatagttatcagtatcatgccaataataccaattactgcaccaactacaaataattcaattacaactaatataacgccaattgagaatattaagatagaatgcatattgacatttccttggattagaaatcccaaaaataaaataagtaatgataatgtggcgataataccagctgcattgatttttttagagtaaagttgatatacaaatcctaagaatgtcaaacaggttaatattaacgtaaaaataggttgaacaattatattactaacttgttcaacccaagtatctccagccgttgattccaagatagtcgtcatttgtaaaaaattattataactcacaatttcacctcgccctcacattaattatacatgaaattgaatatactttatagttataagaacctatagaatatcaatttgattatttataaactatataactttttttaattaaaaattgacaacaaaaaaacatcacatattagtgtcagacactaacttgtgatgtttattttatataattaatattcgtgttgagggagtcaacagaggtattaattatttgaatttacgtttacgtgcagcttctgatttctttttacgttttacgcttggtttttcgtaaaattcacgtttacgtacttcttggattgttccacttttagaaactgaacgtttaaatctacgtaacgcatcttcaagtgattcatttttacgtactactgttttagacatctgtatttccctccctccaaatatcaacggaactttatagtcaattgcacagtaaaactatgcatttataagtataatatatctgtaatttatggtcaattagtaaattgttttttatttgaaacatatttcacatcaaaatcacaaagacttttagattttgttctaaaaatctcttaataatttatttaatgagaagagttgcttatatagtaaattgtgaagccgttaaaacaactttacaaaacctatatctttagtacggaaccttatggtatgaatcaaggaatacttaaactaaaacttctctatcagatttatttgttgcaaaatcaacaactttaattgcttgcccttcatttaatggataatttgcttgcgtaattttaacttttacaatttgacctatgagtgattcgtcaccttcaaattgtactttcatataattatctgcatatccaactaatgtaccttctgtgtcaccctgttcctcaggaattacttcaagcacatcttgatcaaatttagacgcatataactttccgagttgattgcttagcgtaattaacttatgcacgcgttcatttttaatttcttcatcaatttggtcatccattcttgcagctggcgtgccaattctaggagaataagggaaaacatgcagttcagagaacttatgctttacgataaaatcatatgtttcttggaactcagcttcagtttcacctgggaagccaacaattacatcactcgtaactgccaagtctggtaaagctttatgcaattttgttaatcgttctgaaaatctatccattgtatacttacgtctcatacgttttaatactgtatctgaaccagattgtaatggaatatgcaaatgacgcacaacttttgttgaacgttctaaaacgtcaattacttcatctgtaagttgacttgcttcaattgaagaaattcgaattcgttctaatccattaatcgtttcaagatcacgtaataattgggccaagttataatcctttaaatcttgaccatatccacctgtatgaattcccgtcaatacaatttccttatatcctgaattcactagttgcgtcgcttgttcaactactttttccggatctcttgaacgcattaagccacgagcccatggaataatacagaatgtgcagaagttgttacaaccttcttgaatttttaatgacgcacgtgttctatctgtaaaataagggacatctaattcttcatatttacgatttttcatgatatttccaacaccattaattggttggcgttctttacggaattcgtcaatgtaacctaatagtttatgtctatcttgtgtaccaactactacatcgacaccaggaatttccataatttcagctgatgaagtttgcgcataacaacctgttacacagattacagcatcaggattttgtcttattgcacgtctaataatttgacgactttttttatcacctgtattcgttactgtacaagtattaataacaaatacatcagcattcgcttcaaagtcaacgcgctcatagtttgcttctttaaataattgccagattgcttcagtttcataatggtttactttacaacctaatgtgtgaaacgcaactgttgacataaatattcaccccattaattctttttcataacttattgcacttaacgcatacaatggcgcagtttctgcccgtaaaattctcggtccaagaccaacaactgtactagtattactaaataatgaaatttcattttctgacaaaccaccctcaggaccaaaaatcatcaacactttatcctgagccttgaattgttgtaaagtttgcttgaaattgcttaactcaccatcttttgcttcctcttcatatgcaataagaatatagtcataattatcaatagtatcacaaattaattttaaattcgactcgaattgaatagatggaatcactaaacgatagctttgttcagcagcttctttaattattttttgccaacgctctatctttttggcaactttcccctcgtttaatttaacaattgagcgttccatgctaacagctataaatgatgaagcacccaattcagtagctttttgcagcaaccactcatatttgtcagctttaattagcccactgcaaatcgtaacatcaactggcaattctgtattaatattttgtttttcttttaaatcaactgcaattttatcacttgttatatcagcaatttcacataaataaactgtttgatcattaaaagttaaaataattttactaccaacatcatatctcattacatttgttatatgatgaatatcttctttttttgtaataaaaaaacgctgacttacatcagcgttttggtctatgaaataacgttgcacattattcactcactttctggccaacaagacaaacccaaccgttgtcatgttgttctgaaataattttaaaacctacacgctccatatgtgactgtataccttcatacttctcttttataataccagaagtaataaaataaccgccttcatttagagtattataagcatcttcaatcatttcatcaataatatgcgctaaaatatttgctattacaatatcaaatttttctgtttcgtctttcaataagttacctggaacagcttcaattaacgtttcacaatgatttcttctgaagttttctttagctacactcactgccatttcatcaatatccaacgctttaatacgttttacaccgattagatgacttgcaatacttaatatacctgagccagtaccaacatcaattactgaatgctgtggcaatacatatgtttctattgccttcaaacacatacttgtagtcggatgatcgcctgttccaaaagccatacctgggtcgagctcaatgcaaagctcttcatccgcttctttagcatatgtttcccaactagggactattgtgaacttcttcgacgctcggaatggatggaaatagtttttccattcattttcccaatccgtttctgcaatgatttgctcactgaattgaacgttttgttgatcaagttcatctaaatttaataactcatctttaattcgctgtcgcaacttatcatcataagtcatctcattaaaataggctttcaatcttactcccttatctggataatcctcttttttcaaagcgtaaatttcaccgtatttatcttctggttgattaattaaatcatctgaatcttctatcacgacaccatttgatccatgattttcaagtatattggtagccaattctactgcttcatgattaataataattgaaagctctgtccagttcatactttattctcccttaaagaatctttttgctctatctttaaaattcgaaggttgttcattaatttcttcaccatttaattgggcaaattctttcattagttctttttgtctatctgttaatttagtaggtgttactactttaatatcaacatataaatctccgtatccatagccatgaacattttttatacccttttcttttaagcggaattgcttacctgtttgtgtaccagcagggattgttaacataacttcattatttaatgttggtatttttatttcatcgcctaaagctgcttgtgggaagctaacatttaatttgtaataaatatcatcaccatcacgtttaaatgtttcagatggtttaactctaaatactacgtataaatcgccagcaggtcctccattcacgcctggagagccttcaccagctaatctaatttgttgttcattgtcgacaccttcaggtactttcacttctaatttaactgttttattttcagtaccttttccgtgacatgttggacaagcttcttcaaattcttgaccacttccattacatttaggacaaacttgttcagtacgaactctacctaaaattgtattttgttctacagctacatgaccagcgccattacagtaactacaagtctttttacttgttccaggctttgcaccatcaccatgacatgtttcgcatgttacatctttacggattgaaatttcttttgttgtaccaaataccgcttcttcaaatgtcaatgtcattgtatactgaagatcatcacctttttgcggtgcatttggatctctttgtctgccgccaccgaagaaagagctaaagatatcttcaaaaccgccgccaccgaagccactaaaaccgccaaagtcagagccattgaatccttgtccaccaaaaccttgtggcccgtcatgtccaaattgatcatagcttgcgcgtttattatcatcacttaaaacttcataggcttcagaaatttctttaaacttttcatctgcaccttcttctttgttaatatctggatgatattttttcgaaagctttcgatacgcttttttgatttcatcttttgaagcatctttactaatgcctaaaacttcataatagtctcttttggccacagctatctctccttttcttaattaactcatatagtttaacgtaatatgtcatactatccaaataaaaagccaaagccaatgttctattgactttgacttttcagatcatgacaacattctaattgtattgtttaattattttttgtcgtcgtcttttacttctttaaattcagcatcttctacagtactatcgttgttttgaccagcattagcaccttgtgcttgttgttgctgttgagccgcttgctcatatacttttgctgataattcttgaatcactttttcaagttcttcttttttagatttaatatcttctatatcttgaccttctaaagcagttttaagagcgtcttttttctcttcagcagattttttatcttcttcaccgatattttcgcctaaatcagttaaagttttttcaacttggaatactaggctgtcagcttcgtttcttaagtctacttcttcacgacgttttttatctgcttcagcgttaacttcagcatcttttaccatacggtcgatttcttcgtctgataatgaagaacttgattgaattgtaattctttgttctttatttgtacctaagtcttttgcagttacatttacaataccgtttttatcgatatcaaacgttacttcaatttgaggtttaccacgttcagctggtggaatatcagtcaattggaatctaccaagtgttttattatccgcagccattggacgttcaccttgtaatacgtgtacatctactgatggttgattatcaactgcagttgaatagatttgagatttagatgtaggaatcgtagtgttacgttcaattaacgtattcatacgtccacctaaaatttcaatacctaaagatagtggtgttacgtctaataatactacgtctttaacgtcacctgtgataacgccaccttggattgcagctcccattgccactacttcgtctgggtttacacctttgttaggttctttaccgatttcttttttgacagcttcttgtaccgctggaatacgagttgatccaccaactaagataacttcatcgatatctgagtttgttaagccagcgtctttcattgcttggcgtgtaggttccattgttcttctaattaatgaatctgataattcctcaaatttagaacgagttaagtttacttctaagtgtaatggaccgttttcaccagctgagataaatggtaatgagatttgagtttgtgatacacctgataagtcttttttagctttttcagcagcatctttcaaacgttgtaatgccattttatcttgagataagtctacgccattttcttttttgaattctgcaactaggtagtcaataattacttggtcaaaatcatcaccgccaagtttgttgtcaccggctgttgatagtacttcgaatacaccgtcacctaattctaggatagatacgtcaaatgtaccgccacctaagtcaaaaacaagaactttttcatctttgtcagttttgtctaaaccatatgctaatgctgcagctgttggttcattaatgatacgctcaacttctaaaccagcaattttaccagcatctttagttgcttgacgttcagcatcgttaaagtatgcaggtactgtaattacagctttgtcaactttctcacctaaatagctttcagctgtattttttaagttttgtaaaatcatagctgagatttcttgtggtgtgtatgatttaccttcaatatctactttataatcagtacccatatgacgtttaatagattgaacagtatttgggtttgtaatagcttgacgtttagctacttcaccaacttgagtttctccatttttgaaagctacaacagatggtgttgtacgtgaaccttcagggttttgaattacttttggctcatcgccttctaatactgttacacatgaatttgttgtacctaagtctataccaataattttactcataataaaattcctccatttaatcattaaattaatttgattttaaacaatgtcgtttcgccaaatttatgttattggtttactttgaccattgatggtcttaatactctatctttcagcttgtatcctttttgtagttcttgagtgatttcgccagattcaaaatcagggttatcatcttgaactacagcttggtgaatatttggatcaaatgcttcaccttcagttttaataacttcaagaccattatcttttaatgcgttaatcaaactttcatgcaccatttgtacacctttttgaagagatttaaaagtctcatcatcaccttcaatttgaagtgcacgttctatattgtctattgctggtaaaatatctgttaacacacgttgtgcttgatatgttttatttatttcattttctttttgaattctacgcttataattttcaaactcagcgtagagccttaaatatttctcttcgttttcatctgctaattgttgaagttcattaattttttgatcttttggatctatttcttcaataacattctcgtcagacgtttcttctattgcttcatcttgtaaatgacctttactttcttcagtttgttcaactgaatcatcaatattttgtttgacgtttgtttcttcaactgttgattcagtgtttttttcaactgattcgtctttatttgtcattttctgtcctccaatactttctaatccatcattaccaaattctatttaataattgaatgacattttgataatgcatagctgtaggtccaatcacagcgatttgaccttttaacgtttcatcaaaatgatattgacttgttacaattgaaatatcacttaagctgtcatcaatttcattaccaatttttacattaatatttggtgaagatatatcttgtaataattctgcaattctatttgattctatatattgtagaatgggctgaattgaagatacattactttcattcaatgcatcaataagtttaacctttccacccatataaatgctattactttgattagaaatatgattattcatcgtatttatcaatttattgataaatatttcttcctgctctgattgaacaaaagagacaatatcatcttgtaaattctgattaaactcagttagtttgttagtaacaaaatttgatattgtatttagtttatcattactaaacggtatgtctgaagcaagatgtacatgctcaacatgacctgatgaaaatacgataaccattataactaaattaggattagcacgaatcaaatgtacattattgataatatcttgtttatgattaggatgaacaactaaagttgtatattgagatatatttgataattcatctgcaaaatatgtcaatgctgatgatacatcatattgattctcaactaacaattgatttaatcgtcttaatttatttgttttttgatgagatgtttgttcaagtaaacgattgacataatacctaaaacctaattgtgatggcgaacgccctgaagaactatgtgtcttttcgatatagtttaaatcttcaagctgtttcatctcatttctaattgtagcaggactaacattcaagttatgtcgctcaattagtgttttagaaccaacgggttgtccaaaatcaacataatcctcaacaattgcgtttaatatactcaattgcctatctgtaatcatgttttcacctcattagcactcacttatctcaagtgctaattataatttatcaaattggtcaaagtaagtcaatgttaaaggctcgaaatttcaatttttttaatcatttattaggaaagcttcaaaaacctcattaccaatgactttccctcgatttgtaagtgcaatcgcatcgttcttttctacaattaatttcttctcttttaaattatttattgtttgaccaaagacactttcaatagattggtcaaacttctttttgaaccttctactactcacaccttcatttaaacgcaacccaagaaacatttcttcttccattctctcagtcaaagaaggtttatttgatactaaaattgctttactttctttatttatagctttgatataatgattcactggattgatattcgtataacgaacaccatctacataaccacttgcacctgctccaaatccataatattcctcattaaaccaataaaccttattatgttctgattcatggccatctaatgcaaaattagatatttcgtattgatggaaaggagattgttctatcttagacatcagcaactgatacatgtcagcacctaaatcctcattaggaagtttgagcaagccttttctatacatattataaaattgggttttaggttcaagtattaagccgtaactcgaaatatgttgaatatccatatctaaagctagatctaaactttgttcaaaatcttcaatcgtctgtttcggtaaatgatacattaaatctaaactgattgatttaatacctgcgtttttagcatttaacaccgaagtgtaaatatcttcagtattgtgcgttctacctaaaacagacaataactccggcttgaatgtttgaacgcccattgaaattctgtttactccatatttctctaatagttggactttctctttagttaactcatcaggatttgcttcaaatgtatactcgcctgtgattgtaaacgtatcacgtattgctttaagtaatctttccaactgattaatagaaagggccgttggtgtgccgccacctacatacatggtctttaagatcctatattttgctgtagacatttctgtgattagtgcatctaagtactcatctacaggttgattctgtataaaatatttattgaaatcacaatatgtacatattcttacacaaaatggaatatgtatatatgcactttgtaccgtcattttaatgccccgcttctcagactttttatccaatcggctatatcctgttggactatctgcaattattcttacttttaactttaacgtttaatcaatgattgtctaatatatcgattcattttaatatttataaatgttaagagagagtgagatagaaataataaagaaccactaatgatttattatgtagtggctcttacacattagccagaggtaatatgtacttaaaaatagaattacatgagttaaactcatgcataagggagtgggacagaaatgatattttcgcaaaatttatttcgtcgtcccaccccaacttgcacattattgtaagctgacttttcgtcagcttctatgttggggccccattgttataagctcattttaactctgtcgatgactgccaatataacattgtaaagcccaggacgttaatttatcctaggctcccgctttttagttattaaactttattcattgttaattgttaattgttaattaattttttaaaaattattcgtcatccattttcaatacagccaagaaagcatcctgtggaatttcaacattaccaactgctttcatcttagctttacctgctttttgtttttcaagtaatttacgtttacggcttatgtcaccgccataacatttagctaaaacatttttacccattgatttaatatttgtacgtgctacaattttttgtcctattgcagcctgtacaggtacttcaaattgctgtcttggaattaacgttttaagtttttcaactaatgctttaccacgttcatatgcaaaatctctatgaactatgaagcttagagcatccactttatcaccatttaataaaatatccatcttcactaaattactttctttattttcgatgaactcataatcaaatgatgcatatcctttggtattagatttaagttgatcgaagaaatcaaatacaacttcagctaaaggtaattcataaacaatatttacacgaatatcatctaaatagtccatatttataaattgtccacgtttacgttgacataattccattactgcacctacatagtcatttggaaccatcatagttgcacgaacatatggctcaaatattttatcaattttatcacgatctggcatttgtgctgggttatcaaccgtcacttctgaaccgtcccttaaaatacattgataaattacagatggtgcggttgcaattaattcaatgccaaattctctttcaattctttcttgaattatttccatgtgtaacatacctaagaaaccagttctataaccaaaacctaatgcttgtgatgattcaggctcgaattctaatgatgcatcattcaattgtaatttttctaatgcttctcttaaatcattataatttttgttatctatcgggaacagtccacaatataccattggattcattttcttataaccttgcaatggttctgatgcaggtctactagctaatgtgattgtgtcaccaaccctagaatcatcaacatttttaatacttgcaataatataaccaacatcaccaactgttaattcatcaactggaagctgcttaggtgtattaattccaacttctgttacttcgaactctttaccagtggccatcattcgaattttatctccggctttaacaacaccgtctacaattcttatcgatgaaattacccctctatatggatcatactcagaatcaaaaattaacgcttttagtggtgcttctgggtcaccatctggagctggcacaacttcaactattttctcaagtatctcttcaattccaatgttagatttagcacttgctaaaacaacatcatcttggtctaaacctatcatatcttcaatttcttgtttcacgcgttcaggttctgcagcaggtaaatcaattttgttaataacaggcaataattctaactcattatctaatgccaaataaacatttgctaatgtttgtgcttcgataccttgagccgcatctactactaaaatcgcgccctcacaagctgccaaagaacgtgacacttcatatgtaaaatcgacgtgtccaggcgtatcgattaaatggaatgtataagtatttccatctttagcttcgtactttaaacgtactgcgtttaatttgattgtaataccacgttctctttctaaatccattgaatctagtaactgatcttgcatgtctcttgtttcaactgatttggtattttctaaaattctatcagccaatgtagattttccgtggtcaatatgtgctataatcgagaaattccttatattctctcttctttttaagcgttgctcattatccattttatccttctcactttcataaaataaacccgtattatctttcgcatctttgatataataacgtttttaataggtaaatgcaaacgccataatcttggatgaactttgaaattataacaatctttatttaaatacatacttgcgatatgttaatatgttaattacgtacttataattataaaacgtattgattgtgtttccaacacaatttattaaatctgcaaaattttaagctaaccccatcaaataaatgattgcacaacggttagacttttgttaaaatatttcttgttgtaatcaaataaaattttgataagatgaactcacttttaggaggtgacagaaatggcaaatatcaaatctgcaattaaacgtgtaaaaacaactgaaaaagctgaagcacgcaacatttcacaaaagagtgcaatgcgtacagcagttaaaaacgctaaaacagctgtttcaaataacgctgataataaaaatgaattagtaagcttagcagttaagttagtagacaaagctgctcaaagtaatttaatacattcaaacaaagctgaccgtattaaatcacaattaatgactgcaaataaataatctttttaaataaaagttcaagcgcatgcttgaacttttattttttataaagatagaatgaataattccagtattaactgtttatccatatatgatgatttaagtttataatcagtttccgcacaagcatctataatattcaataattcatcaagttgataatgtcttacttgtcctaacgctaattttactctgtatggatgtacgcctattgttttagcaatttgctgtccactatatcctttttgactcagaatcttacattgataaaataatcggtaattacttgtaattagtgcaagtaatttaataggttcttctttcatagttattaaatcttttactaaatgaattgcttgttctttctttcttttctgaatgtattcagtcagtaaaaatacattttgctctaaacttctattaataatttggttaacatcctgcttattgattgttggtctatcgcctaaaaataaaatcaacttttctatctcttgtgagacaatattaaagttaatacctgtcaactcaataaataaatctaatgcatctcttttgatatctttgaaattctcatttaatttactttgaatccatttttttatttcttcttcagacatttgctctatttttttaagccttgcatgcttttttagagttttagttaacttttttctttcatcaagtttattttgatatatctcaaagacaatcaaattttcgccatcatatttttcaataaattctattaattgatctacattgtgagccatatcttttggcgatttttcacctgtaaatatatatgcatttttaaccaaaattgcttttttatctgaaaagaaaggcaatgttaatgtttcttcaacaattggtgcaatctctgtttcgtataaattatatttcacaaagttaaagtcatctctatcacttttcaaaaattgtgatatgatttctgcactttgtttttcaaccaattcaggcacatctccataaatagctacaatattgtcgctcattcattacaccctttcattcgtttgacacatcaatagattatatcatgtttctgtatctataaaccacttgcatttccataagagtttgaatcaacttttaaattatcatctaagtcaattgtaacttgaccgttttgttgactattgtaaatgcgactgcgaatcctttgcaatcgtttaacaacttctatgttaggaagatgatacatattgttctttccagaagaaatcaaacttattttaggcttaatcatctctataaattctttagaactacttgtcttgctcccatgatgtcctacttttaaaacatcaatctccggcaagttatatttttttagtagtaaagattcattatttttactagcatcgcccattaataaaacttttttattttgatatgtaatcatagtaataatcgaatattcatttttatctcggctatttggaataaaactatcaaaaaatagaaaactactatctccaagtttaaaactactaacttgtcttacatccataagtttaatgttatacttatggcttaatttcgataataacatcaatgtattactactatatcccttattgtatatcactatatgtttaattttaatatgactaataatatattccacttcaccaatatggtcattgtgtggatgtgttaaaattagatactctaattcatttatccctctttcatttagcgttggtaaaatatgatatttagaaattgaataactaggttgtttagtatcatcaatcactttcccacctgtatcaatcaagacattttggttcttaccaccttcatataaaatactgtctccctgccccacatttaacattgtaattttgtgatgtgaatttgttggaaacgttattaataatgtcagaataattatagtccaaaacgtaaccaatatatatttacgtttagccaataaccaaaatatgtaataaacagaaattataaatattataaatatccaatcattaaacttgggaacagaaaaatgtgattgcttgattcttgtgaataggtctagtaaccagtcatgaaaattaaaacttaggtcaaccaagtaatttagcggcgttaatcccacaataaaatgacttgtaataaagaataaaatagatagcgaaaacaatataaacgaatagtacggtacaaaaatcaaattagataaaaatcccacccattgaatttgatgaaagtttggaatggcaacgataaatgaagctaattgtgcaataaacgtaattatgaataatgattgtaactttgacaattgctgtaaaaaaggaaaaagtagcataataaaaaatgaaatgatgaatgaaaattgaaatccaatatcataaacaactagtggatttaaaataaacataattataaatgcaaatgctaatagatgaataccctttattttaatttgcttagtaataagcagtacaagagttgtcattattatagctcttacagcactaggtgcataatttgtatattgagcaaataaagctaatacaatgattgtaattcctttaatgacaaataaaggtaaatttaatcgttttaaaggttggtaaattaagaatacaattgcagctatatgcgagccactaactgccagcaaatgatatatacctatctctttaacacgttccttaaattgctcattaatttcttttacgtcaccagtaatcaatgccataatacgatccggaaacttaatacccgaatcataaattcgattcattataaactgtttatgtttctcaattaaattagaccggttcgattctaggcagctttgtacaactatactctgtaatttaagagttacaaacttattgtcattaactttgaattgtcctttaacaatacaattacgactttcaattttctttaaatcaaaattctttttatttgttaaaaagaaaggatatatttcattttttaaactcaacctacctttatatgtgtcactaccttgacgttgaatttggattacttgagcacgctcattaaactgagaattacgttcaatataattgatataattaaatattgcttgttgtgaataatgtaaataccatgaggagaaaatgattaaaaagagagaaataggggcataaacgattttatttttacgataagcaatatacaaaagtaaaatgaaaagaaatgtagagagcactttgctagaattccaaagcactcctacaatcattgataatgcgacatacagcaaaacattaacctttagtcagatatttagcaacatattctggtgaaaatggaatttttttaaattcaataccagattgtttgagtaatttagttgcatattcatggttatgataatcttctgcatagtagatacgctttatacctgcttgaataattgactttgtacaatttaggcatggaaaatgagtaacatagattgttgcaccttcagtagatacaccttgttttgcacattgtaataaagcattcatttctgcatgtatcgttctgatacaatgtccatcttcaattaaacatccttcatctatacaatgcacctcgccagctacagagccattataaccaccagcaataatacgattatccttaacaatcgttgcacctacagataatctttgacaagttgaacgtaatgctagcaaatgactttgtgccataaaatattcttcccatttgattctttccaagatgttcaccttccatacttaaaatttagtaacattttctaataatataagattaatcacaaaaaataaaatttgcaattaaaataatccattatgtcgtgaaataagatttcagtttatcaaaagttttacttccaaaaccttttacttttttcaaatcgtcaatttcttgaaatgcaccttgttggttgcgatattcaacaattgcattagctttagcttgcccaactccaggaacagacatccattctgatacagatgccgtatttaaatttactttagtattatttgtgttcccattttttacgtgcacactgtttactccaatttgtggttcaacattcttttgtcctttatgaggaatgaaaatcattttttgatctgttaatttttcagacaaattaatttgacttacatctgcatcatccaataattgtgctttatcaagtaaatcaactactctatccttagatgtcattttataaacattaggatgtttaacagcaccttttacatcgacatatacaggacctttatttttggaattatctccatctttgacctggacatcttctaatttggacaaactactaatttcactagtgctttgtttcagagcagtatctttattttcaaaatttcttgtagtataatcatcttgtctccagaatataaaaccaattaataccataattaaaacaacagcacttataatatataacttgcattgagttaaaaaatctttatagcgtaataaaaattgatacaataaaaccactcctcaactttatacacgtctgagcgagtggttttacttttattttttcgcaatgaaaaacaatctttctgcatcttcattatgttcatctatattaaaatcagtaaatgtttcaacatgtttaaaaccaacttgagctaaccaagacaaatatgtcttttcatcaaatgttctctgaaaatgagactcatcaaatcttgaatatgtttcatcttcatgtcgaatgaaaaatgtcatatcatgataaacacttaaaggtaaatctccttgcacagcatcccatgctaaaaaaatgtcccctttatcatcaatataactttgattattaaacaaagtcatcattttataaacagtatgtacatcaaaaataaatacacctgaatcagtcagatgatgataaacattgatgaatgtttcaataactgcagtttcatcttgcaaataatttagagagtcacaaaaaatagtgatgatatcaaattgttgttgcaaatcaaaagatgtcatatctccttcaagccaatttacatttgctgatttttgagctgcaacagtcaacatatcaacacttaaatccataccagtaacattacctaaagcttctagttgaactgttaaactaccagtaccgcaaccaatatctaaaatatttgattcacctttgcagtgattttttacaatttcaaaccatttttcatatggttgatcttgagtcaattgatcgtacactaggctcatttctgcatattgcgacataattaatacgcaacctgaccatatgattctaatggtgcatcttgatataacttttcaatattataataatttctttcgtctttatggaaaacatgtaccacaacatcagctaagtcaattaatatccaacgcgcttcattgtatccttccatacgttttacttctatattttgttcattggctacttctttcaccgctctagcaatcgcttgaacttgtctttcattatttccgtgcgttacaacaaaataatctgtcatatcgctgatacctttcatttctaaagaaatcgtatcttcgccttttttattgtcaattgcatccacagcaattgctaataattcttgtgaattcatttaatcatcctttattctttcgtcactatagttataataatttaaacagtcaatcgtcttattatataccgtaatatctttctgtattaaaaatagtactgtgcgtttagaaatttcataaattgtcttatctaaactaccttgattgtatgccatatctcgaatatcatcaactcctgggattgttcttccaggttcgatgtaatctgcaataaaaatcagtttttcagtttttgtcatttgttgacgtccagtagtatgatatttgatagccattaatacttcctcatcattgataccatattcatgttccatgattgctgcacacacaggaccatgcaatatttcactaccataactcagtagatcattacctaattcgtattgtcgaacaatttgatacattttacctaaatcatcatatttacagaaatcatgtaatacacctgctaattctactttactagtgtctccatcataaatttctgctaatttaatcgctgtttctgcaactcttaaagaatgattataacgtttctctggcagtttctcttttgcaagccgttttgctttttcaatgttcatataatccttcccccttaatatagttttcaacggatttaggaacaagaacttggatagatttcccttcactaactctttgtcgaatcattgtcgaacttatatctaccctaggtatctgaattgcaatcatagcattattaacattttgactatttttgtctcgatttacaactacaaaagtaaccatttcttttaagtattcaatttgataccatttctctagttggttatactgatctgtcccaataacaaagtacaactcactgtctttgtgttgctccttgaatgccttgattgtgtcataggtataactttgaccaccacgtttaatttcatcgtcgcaaatatctccaaaaccaagctcgtcgataatcatctgtatcattgttaatctgtgctgaacgtctataaaatcatggtgctttttcaatggagacataaaactaggtaaaaaataaaattcatccggctgtaattcatgaaatacttcgctagctactatcatatgtgcagtatggatagggttaaactgaccgccgtaaagtactatctttttcattattatggcaattcaatttctttattatctttagattctctataaatcactatcatagatccaatcacttgcactaattcactacgcgtagcttcgcttaatgtttcagctaattcttttttatcatcaaagttattttgtagtacatgtactttaatcaattctctgttttctaacgtatcatctatttgtttaatcatgttttcgttgataccgccttttccaatttgaaaaatcggatcaatattgtgtgctaaacttcttaagtatcttttttgtttgccagtaagcatatgttattctccttttaattgttgtaaaactgctgttttcatagaattaatatcagcatctttattagtccaaattttaaagctttccgcaccttggtaaacaaacatatctaagccattataaatatggtttcccttgcgctctgcttcctctaaaataggtgttttatacggtatataaataatgtcactcattaaagtattgggagaaagatgctttaaattaataatactttcgttatttccagccatacccgctggtgttgtattaataacaatatcgaattcagctaaatacttttcagcatctgccaatgaaatttggtttatatttaaattccaagattcaaaacgagccatcgttctattcgcaacagttaatttgggctttacaaattttgctaattcataagcaatacctttacttgcaccacctgcgcccaaaattaaaatatatgcattttctaaatctggataaacgctgtgcaatcctttaacataaccaataccatctgtattataccctatccacttgccatcttttatcaaaacagtgttaactgcacctgcattaatcgcttgttcatcaatatgctctaaatacggtatgatacgttctttataaggaattgtgatattaaaaccgtctaattcttttttcgaaataacttctttaattaaatgaaaatcttcaattggaatatttaaagcttcataagtatcatctaatcctaaagaattaaaatttgctctatgcataacgggcgacaaggaatgtgaaataggatttccgataactgcaaatttcattttttaaatcaccttataaaatagaatttcttaatacaacatcaacatttttaggaacacgaacgattactttagctcctggtcctatagttataaagcctagaccagagatcataacatcgcgtttctctttgcctgtttcaagtctaacagcctttacctcattaagatcaaaattttgtggatttccaggtggcgttaataaatcgccaagttgattacgccataaatcattggccttctccgttttagtacgatgtatattcaagtcattagaaaagaaacaaactaacggacgtttaccacctgatacataatctatgcgcgctagaccgccgaagaataatgtttgcgcctcatttaattgatatacgcgttgttttatttctttcttaggcataataattttcaattctttttcactaactaaatgcgtcatttgatgatcttgaataatacctggtgtatcatacataaatgatgtttcatctaaaggaatatctatcatatctaaagttgttccagggaatcttgaagttgttactacatctttttcaccaacactagcttcaatcagtttattaatcaatgtagatttcccaacattcgttgtccctacaatatacacatcttcattttctcgaatattcgcaattgatgataataagtcgtctatgccccagcctttttcagctgaaattaatacgacatcgtcagcttccaaaccatattttcttgctgttcgttttaaccattctttaactcgacgtttattaatttgtttcggtaataaatccaatttatttgctgctaaaatgatttttttgtttccgacaatacgtttaactgcattaataaatgatccttcaaagtcaaatacatccacaacattgacgacaatgccctttttatccgcaagtcctgataataattttaaaaagtcttcactttctaatcctacatcttgaacttcgttataatttttcaagcggaaacaacgtctgcaaatcacgtcatcacgaaacatattatgctctggtacaaaaccaggtttatttttatcttcagattgaagtggcgcaccacaaccgatacattttaaaatgtcagacaatcaattttcctcccatgtgatataaccttttttactgaaatgacgtaataatcgtctttcaattaatctattaaacttagtaataaagccatcagttcgtttaactggaacgaccataattgtatataaacctcgacgattaccaccaaatacatcagtaagcatttggtcacctataacaacagtttgatctggtctgatattcatcttagttattgctttatcaaacgctttccccattggctttctcgctttaaaaataaaatcgatgtctaaatgctgactaaaactagcaacacgagactcattattattagacacgattgtaatagtgattcctttttcattagcttccttaaaccatgctttaacacgttctgtaggttctttaacatcccaacctactagcgtattatctaaatctgtaataatacctttaacgcctttgcccactaacttgtctaaatcaatttgaaatattgattgaacatatgaattcggcataaaaaacttgcgaactaaacccatttaactcacctttacctttttataattgagacactaatgcttcaacagtttgacttgaagatacagctgctttttctaaaaatgcttcgaagctcatttccgcttctccatttgctaagtctgaaactgcacgaactacaacaaatggtacattaaattgataacatgtttgtgcaattgcagttgcttccatttcaaccgccatcgcatttggaaatgcttttttaattttttggcgttgttcaacactaccgataaagctatcaccacttacaattaagcctactttagctgttaattgttgttgttgttgttgtacaacttgagatactttttctattaaaggtttacttgattgaaatgctaccggcatctgtggtatttgtccatattcataaccaaatgctgttgcatccgcatcatgatattttacatcatcacttataagaacgtcacctacatttaaactttcatctaaagctccagcagaacctgtattaataatgatgtccggtttaaacttattaattaataatgtcgtagaaattgcagcattaacttttccaatgccgctttgggtaatcactacttctctatcttttaaaatgccagtataaaatttaacatgtgcaactgaaatttcgcttaattgtgttaatttattttttaatatttttacttcttcttccatggcaccaattataccaatcatcctttgattcacctcttttaaaaaatcctagcatttgttattttatcacattttaatcactacaacgacaagtatcatgattttcattactgtataaaacttttgctttatttttataaaaacattcacaataacttggtatcataaataattatttttgaactcataacagtgaaatcgatgcttctaatttgtctatttttcaaaactaatcatatcaattacatcagccaatcgtgtcaagaaactttattaaataacaggaaaatgatatgtttaaaataataatgatgaaataagaggattttacaatggctgaaaataatcaaaatagtctcgtaacaaagatagctacatacggcagttttattgcaattgcgtcgtttgtcattttatttataagtatatttttaaagttttcatttaatatcgagtttacagcaacaattatgaacatatgtcgctacactctaattctaggatttatacttatgtccttacctgatgttgttgataaaaacatcaagaaaattatattcgatgcatttattatcatcgtctttatcttctttttactatagtagttttattttgtaattatacagttaatcatatttgtttcgtatcgaattcctgtgtgcattaaagattattctaatagaaaacagcagtaagacttttctgagtggtagcatccttactgctgtttttatttgtaacaatataatgacaggtactttatatttcactgtcaaagatcattaatgattaactcacttaaattatgatttgaataaatagatatctaaatgcaatttgtcactattgatagttttattatcagcatacatttttaatacctcatgaccatactcaccatttaaattataaaaatcatattctacatttttttcatcatcattatgatatttaacataccctttaacaatgtcgccacctttttcgtacaacttatacttctcactcaaataatttcttaattgaacatctaattcttgaatggtaacaattttctttttcgtttttactgcagttagttctatttctgtttgatgtccgtcaatccataaattacaaggtatattcttataatcatcgtacttattattgtcacttaaagtaacccctccataactacattgcgttttattggtttctcccccatgacattcatagctatagcttccagcatatatatcgatattcttatttataaattcattggaaagtgcctcattttcgaattcaactttaaaatcctttttcgaagcatcatttaagaacatgtcatgaaataacaaatcatgagtcaacagtctatcgtttgtttttttattttcaagctgagttggattgatgaatgacatcttagcattacttagacgctttgaattaagtttacttttatgatgtaagtctgaatattcgattgcacttgctgaatttgtcaaaattccttctaacaataatattaaaataaatcctgttaaatatttaacttcaaactcccccaaaatcaattattaatttacatttgagagcgagacataaatgataaacaggctaggaaagaaatcaatgttctatgctctacgaagttatattggcagtagttgactgaacgaaaatgcacttgtaacaagcttttttcaattctagtcaggggccccaacacagagaatttcgaaaagaaattctacaggcaatgcaagttggggcggggccccaacatagaagctggcggaaagtcagcttacaataatgtgcaagttgggtgggacgacgaaataaattttgcgaaaatatcatttctgtcccactccctagagcctacaattttgatttatgtatcacactcataatacttttcaatttgaaataccctgttcgcaattattagttgagttatatcaaccaatacagtgtaaacttaaaaattccaaaccgtttaacagtatatcagaaaaaatgataattatttcaattatttttattaaatttcataataattcatataatattcgcattaaaacatcacaatactgatacacaacaaaaagagcagtacatttgtcatgcaccactctcttaaaatatattttttcaatgaagcaattacgcaatcttacaaatactataagtatagctgaatcacatattacatttattttataatcgaatttagaaattcatcacttatctcataaattgttggtctacttttaattttaactaagtagttaccaaattttttaattgtattattaatttttactcttcctactcccaatatgttttctaaatcaattaatgttaatctatttcttttatttccaaacaatttatccattgaaaggagatacaaaaattcataatctatctgtttataatgactagttaaataaagcgttaatttttcagtcgcatccatttttggtattaactcatcaagtattctttcttgtcctgctatcaataactcaagcattgtgtcaataaattccgtcaaatcaccacaattcaaatgatttgaagcagtcataaacgccttgtaatatttcgatttatttctatttatgacatatgaaaatgtcaaagcagtataattatcataataatcactcaagagcttggcaattataaatcttccaactctaccattgccatcataaaaaggatgtatatattcaaacagataatgactagccatgattttgaacggctgaggcgcatcaaaatattttaaaaatgttagcatttcacctatatattcaacaattttggtttcaggttgtaacccaacatgtatatatttattcgttgacccatcatgcacaccgacaaaatttttacgaaatagctctccatctaacttatcttgttcgttaatttcatttaaaactaatttatcgtaaatcgctctaatgtctcttacattatcaactttaatttttttattaagttctatctttttatattgatccacgaggcctctgaacttaagaaattctgatgcttggttatttaacgcatgtgcaatctcttgtttagtactaaatacattttcaatttcattagtactttgtaattcatcgattaataaatcattaaaatattgttctctagctgcataaggtaaagaattaagtgctctatcaatttttctactattaattgatattaattcttgtttttttgatagatttttagtcaccataaagaatagaggatattccacatcattaactttttttccattttccataggtatgatattaatattagtattgaaagaagctgaagaattaaatcttttaatatactcttccttcattttactttcattgtgttcatgaaaaatactttttaaagttctgtaacccatttgcagcctcctctactcatttaaaatgtatttttagctcaataaatccatttttattagattagctaaatattatcactttttttctttaaaaactatataaatatctattttctcaatcaatagaaaaagatttttcatcataacaaaaagagcagtatacttgtcatgcaccactctctcttaaaatatatctaattatgctttataaatgaatcacaggaaatcaaaatacatcttgcctaatactaacaacatttaaagtgatgctattagtcgaaatgtcttttaaaataactgaagtacttctttgaatgagaatatacctgtcaatattgtaacaagtactgcaacgataccaaagatgaacatccaatttgggtgtttataatcaccgacaattgatttctttttacttgcaatcaaaattgcacctaacgtaataggtaaaatccatccatttatcgcgcctgctataattaaaaggctgattggttttccaataaataaaaaaatcattgttgaaataacgataaacacaatgacaattaaattacttcttttgttaagtgatttatgaagtgtttttaaaaatgttgcgcttgtgtatgctgagccaattactgatgacatagctgcagcaaataacacaataccaaaaatattctttccaattggtccaattgcgtgttcaaaaactgaagctggtggattttcagaacttagtgtcacacctgttacaacaactcctaataccgctaggaatagtaacgttctcataatacctgtagttaaaatacctgcaattgctgattgatttacaaatggtaaatattgcttacctttaatgccagagtctaatatacgatgtgcacctgcaaaggtaatataaccacctacagttccaccaactaacgtaatgattggcaagactaatttcattggatgttctggcgcaaatgtatgcacaaaagcatcaccataaggtggattagaaacaaacatcacatatgccacaactaaaatcatcacaataccaagaatcattgaaacaacgtccataattttttggccacttttacttacaaagattaatattgcaaagattgcagtaatagctgcgccccattttacatctaatccaaaaattgcatttaaacctaaaccggcaccagcaatattaccaatattaaaagctagaccaccaaatgcaatcaatattgagataacagtaccaagcccaggaacaactttatttgatatttcttgacctcttaaaccagttacaactaatatgcgccatatattaatttgtgcaccaatgtcaatgatgatagacagtaatatggcaaatgcgaaacttgcaaaaaattgtgatgtaaatactgctgtttgcgttaaaaatgctggcccaattgcagaagttgccatcaaaaatacagaacctaataataaccttttatgattttttgtgaattcaaagtcactttcttttttaagctttaaatttctccccattttttagccccctataaggattgaatatcaatgccttctttcattaaaatttctctaattttcgaaacaaataataatgcatgttctccatcaccatgcacacaaattgtatctgcttgtaacgttacttccttattgttttttgaaataactttattttccttcaccatcttcaaaacctgcttaagtgcttcgtcagtttcagtaatcacagcatcactttcttttctactaacgagctgcccatcatcttcgtatcgtctatcagcaaacacttcagaagctgtaattaatccgacattctttgcttctgaaattagatatgaatttgctaatcctactagcactaatgatggatcaaagtcataaacagcttgtgctataacacttgctatttctctatcttttgcacccatctgatacaatgcaccatgcggtttaacatgattaattttaacttgatgaatgcgacaaaacccttgtaatgcacctaattgataaatcatcaaattataaatctcctcattagagatatctatattccgtctgccaaagcctttcaaatcaggtaaaccaggatgtgcacctactgcaacattatgtgctttggcaagttttaccgtttcattcattacattttcatcaccagcgtgaaaaccacaagcaacattcgcacttgtaattaacggaataatttgatgatcaccaccaaaggaataatttccaaatgcttctcctaaatcacaattcaaatcaactcgcattataattccacccctttaacaatttgatgtttttctaaaaatttaatatcaacatcttttgcatctccatcacgatatagtggataatttaaaactgcatataaaaaatcggcagttgtagaaaatccatctatcaccatttcatctaaggtggctttcaatttatcaattgctgaagctctatcatgagattttacaattactttagctactaaagaatcataatatggtgaaacttgataaccgtgatatagtaaagaatcgactcgcacattaaagccttgtggtaaatgtaacgctgtcactttaccaggtgttggttgaaatttcttttcaggattttcggcatttattctcgcttctatcacatgaccattaaattgaatatcgctttgtgaaaaaggtaaatgattatgttccaataaatacaattgtgctgcaaccaaatcacgttctgctcgcatctctgtaacagtatgttcaacttgaattcgagcattcatttcaataaagtaatgtgcggtatcagttactaaaaattcaatcgtacctgcacttctataatttgctgcacgtgcaactttaacagcatcgttacatatttgttgtcgtctttcttcagttaatgctgcacaaggagattcttcgattaatttttgatttttacgttgtacagaacaatcacgttcccctaaatgtacataattatcctgcccatcccccataacttgaacttcaacatgttttgcaacaggtataaaagcctcaacataaacacgatcatcatcaaagtatttttttccttcacttttagcttctttaaatgccttttctaaatcttcagctttctttacaatacgtatacctttaccaccaccgccactggcagctttgataacaactggataaccgatgtctttggcaagcttctcaatttcagacacatgattcacagcaccatttgatcctggaatcacaggaacacctgcatgatgaactgtttgtcttgctgttattttatcccccatcatttccatcgtttttttagtaggccctataaacgctatgccttgttcctcaacggtttgagcaaattttgttgattctgataaaaagccataacctgggtgaattgcattagcaccagtgatttgtgcagcagatatgatgcggtcaatatttaaataactatctaaagcattagcttccccaatacatatagcttgatctgctaaatgtacatgcaagctttgctcgtccccttttgcaaaaactgctacagtttcaatcccatattctctgcaagctcttataatccttacagcaatttcacctctgttcgcaattaaacaacgaagcatttacttaccccctttacttaatacgtaccaaaacttggtcgtattcaacatttgtgccatgatcagctactatttcagtaatttctccagcaacatctgttgttacctcgtttaatactttcatcgcttcaacatatcctataatatctcccttgttaactttgtcaccgactttcacaattggttcagttaattctttactgtcttgtaaaaagaatgtacctaccattggtgatttaatgtcatgataatcatttgtcgaaacatcggagttatcattcgcttttgaagctgtcaaatcattattgttcatactttgatttgattgattactgtgtgcagccaaatgattcgagtcagtgaagtcaatttctatttcatcttcaaaatttttatatttaaatttcttaacatcattttccttcactaatttgattatttgttcgatttttttaatattcattttacaaatccccttttaaaattgttgctaattttttcgaagtatgtcgcaagctagatgtatcaaaaattggagtcttttgatgactcttaagaatttcattaaacagagacatttgttcccgattcttatctacagcttcttggaatgatatccatttaaattgaattgtatcttgtggtttcatctgtgctaactttggcagatcaaatttacatacagttgcaattttggtataaccacctatcgtttgtttatcattaagcagaataataggttgaccatcatttggtacttgaacactgccaagagcaaccggttcagaaatgatatctgcttgattaattggtgcaacgctgtcaccttccaaacgataccccatacggtctgattgttcagtaattaaatatggatgatttacaattttcgctctagcctcttcagaaaatgcctcgaattgaggtccttgaagaatgtgtataatattattttctggcaataagtcgtcctgtaaatgaatagtctttccaatgttttctttaaagtcattatttattttcactgttattacatcattagctaataactttctacccttgaatcctcctatactgcttcgggtatgtgttgcataactttcagcaattggaggtacgttgatagtatgaccaaaagtaagataaccgcgtgcacctttggttattgcacctatttttaaaatgtcacctttctcagctaatatgacagaattcattgatatagttttattatttagcgaggcatttacactaccaccggttataacaaatgtattttgcgtattaaattgaatggtaggaccaaccaaagtatattcaatcgctggaccatcattgttaattaatgactgcgcaaccttaaaactaaattgatccatggcacctgcgcctgaaaatccaatatgttcataaccttttcttcctagatcttgtaccgttgaaaagagacctggttgtaaaatcttaattgacattttcaatcaccacccagtcatcaacattaaatttgccatctgatatatctctttcgatttgtataaattcctgttcatctattgcataaaattgtatccattctcctgcttcatacattgacattggttcacgctcgctgctaaatacttttaacggtgtgcgtccaataatttgccatccgccaggagaatctgatggatatagtcctgtttgattattcgcaatacctacagaacctgcatgaatttttaaccttggctgattacgtctaggtgtatgtagttgttcatcaagtccgcctaagtatggaaatccaggcataaatcctagcatatatattaaataaggtttatttgtatgtttttcaataacttgctcaacagttattcgattatgctttgctacttcttcaatatcaggtccatatgtaccaccatattgaacaggtattttaataatacgattggtttgattcacagtatgaacatttttttcattaaatttgttaagttctaaattttcaattaatttagaaggtgttataacttgttcatcaaaatatattagaactgctcgatacgaagggacaatatcttgaatttctaatatttctttttctcgtatccaccgtaccattgctgtgacatttcgatatgtctcttcggatattttattttcaaaataaatcataattgtctgctcgttaataaatcttacatccactctaaatccccctttttattgcaataaaccagtattgaataccttttcattgtatcattgagaagcacaagttgtttaataagtaattcaaatcgcatacaataacaaatgataatcaatttgttttatcggaaatattttgcttttttaaaatggagtagttaatattgaagctcttacactaatttaggttctgctatcaatcggtctgatggaaaatttttacttttcatctgtccgattttttgattttgaatataaaaaagcacgaccgaagtatcattaacacacttcaatcgcgcaattaaacaatcaatttgaccatttattggatattaacaatttttacgttcatttcgccaccattaggtagtggaacacgaacttcatcatctaaacctttaccaattaacgctttagccattggtgattcatttgaaatcttaccattaaatgcatctgattcagctgaaccaacgatttgataactttcctcttcatcacctggtaattctacaaacgttactgttttaccaattttaacaacgttgttatctccagtatcttcaatgattaatgcatttcttaacatatgctcgattctttgaatatcttgttcgatgaatccttgttcatcttttgctgcatcatactcagagttctctgataagtcaccaaatgaacgtgcaactttaattttctctactacttcaggacgcttaactgtttttaattcttcaagttcacgctctaatttttcaaaaccttcttgagtcattggatattgcttttgattttccatattgtcatcttcctttactgaattatactattgcttgctaactaaagactgaatttttgttgtcataatatctattgcaactttattgctcccaccttcaggaataattatatcagcatatttcttagtcggttcaataaattggtcatgcataggtctaacaacacttaaatattgattgataacagagtccattgaacgcccacgctctttagtatctcgtgttaaacggcgtaatattctcaagtctgcatctgtatcaacatatattttaacatccatcatatcacgtaataccttattttctaaagcgaaaataccttctacgataataacatctttaggtttaaaatcaatggtaatgtcacttcttgtatgactagcataatcatatgtcggtacttctactgctttaccatttttcaagtctttaagattttcaattaataaatcattatcgaatgcaaatggatggtcataattggtttctaggcgctcgtcgaaagtcaagtgcttttgatctttataatagtaatcttgagcaagtaaagcgacactatgaccttctaagtttttcataatttcgttagttacagttgtttttcctgagccagatccaccagctatgccaatgattgtagtagctttcattagccaatttcctttctcatcatgttgtttggatatatcgggcgatccactttaatttgaacgatttgtaatggatggcgcgccgcgtctaagctgttaccttcttcatcataaattgcttctactacttgtgtaaatgtttcaatttctggaccaaagaattctatttcttgacctggtttaaagttatttcgttgttgaatagtcgcaatttttgtatcttcattataatctaataccaaaccgcaaaaatcaaatgatgattttttagattgttgttgaccaaacatctgttcttcataaccaggtgtaccctcaaagaatgctggtgcagtgtctctatttgcacatttatctaactcaattaaccattccggattaatcttaaagttgtcaggatctgccgcatacgcatcaatgactttacgatatactgagacaactgttgcaatataatgaattgacttcatacgtccttcaatttttaatgagtccacaccaatatccatcatttgaggaatagattcgattaattttaaatctttaggactcatcgcaaacggtgtaacttcaccttgattataaaatacatcaagctcaccattatcatcaacttctaataattcataatcccaacgacaactttgacagcaaccacctctgttggaatcccttgcagtcatatgattacttaatgtacatctacctgaataggcgatacacatagcaccatgaataaatgcttcgatttcaatatctactttttccttcatttcacgcatttccatcgcgccggtctcacgtgctaatacaacacgatccaatccttcttctttccaatattctacagctttgtaattagaaagtgattgttgagtagataaatgaatttcaagttttggcgcaacttctttacatgtttcgataattaaaggatctgcaacaatgatacctgtcgcacctgtcttttccaaattacgcaaatatgattctagaccttcaatattctcatcatgtgcaataatatttgtcgtaacataaattttggcaccgtaacggttcgcaaattcaacaccttcagctatttcttccatcgtgaaattatcagcatttgaacgtaatccatattcttgaccacctaaaaatacggcatcagcgccataatgtactgctatttttaacttttctaagtttccagcaggtgctaataattctggtttcttcataactgttttaggagttgatttaatctcttctattgtcttcatgattaacctccttaatatactgtttgtttatataagaaaccttcgtcaaatggtcgatgatcaggttgaatttcttcaattgggtccatcaacataaatttctcatcttcatagatttcaggatcttcattgtacaaatctatcgcttgacgatactgttccgttaccacattaatatattcttccgtttgtagaataccatcgattttaaatgaatctattcccgcctcaaaaaatggtgctaattcttcaattaaacaaatgtcgtttggtgacataatgtgcgtaccattgtaatcttcgtaaactgggtaattattttgtctttcttcatcataaagtaataaagattgttcatcattgcgacgttcaattttcatttggcgatcttggaacgtataataattgcctagtagcatacgctttgattggaacatacaagtcattccttgaacttgcacctcaatttccacatttgaattttcttttatattaataatttcatccaaattcagctcacgtgctaagacagctcttgatgcgcctcttttaccccagtaattacattgaaaatgattagttactaacgtctctgcattccaatgaagtggtattggattctcttgcgccttcacatacattactactgctggatccccgaaaataattctgtcaactcgtatttcatgtaaaaaattaatataatcttctacagcatctaaatgataattatgaaataatccattcaccgccgcatatacttttttatcgtttttgtgagctaatgcgacagcctctgtcatttgttgtctattgaattcccctggaagtcttaaaccaaacttttgctcgccaattacaaaagcatctgcacctaaatcaataagtgtttccatatggcttaatgacttgggtgtgacaagtaattctgtcatagtcattctcctttaattgaaatcgctaatccatcgtctatatttaaaaaattcgttgtatatcctggttgctttattaaccactcattataatcttgaacctttttaaccatttgtcttacatttctcgatctaacaatcccaatatccgatacaaaaccgtgatataaaacattatctgtaattacgagaccttggtgctttaaaagtggtgtatatatttcaaaaaatttctttgattgcgcttttgctgcatcaataaatatcatatcataaactttgtcatttacattttcaaattgctctaaagcattaccttcaataattcgaacctggttttcaaaatgataagtagctaaattttgtttagcatattgaatcatcgtttcattacgctctatcgttgtgacatgaatgtcatcagatatagaagcgaattgcatagaactatagccgattgctgtgccaatttctaaaatatttttaacattattcatacgaattaattgcttaattaaatctaatgttaaacgatctacgattggcacttcatttacttcggcaaattcacgcaaaacttcgattgaactattttgatgttgatgtaaatctattaaatattttttatttaggtcatccatgttttaaacttcctttatgtaaaataagtcaatatgattatgacaataaaataaatcagccttcacaattgattataattttgccaaccaattaaatgactgatttcgtgttagacgcaaagctattttatttatagaagcgaatcattcatataaaatttaactttagatattttaccatattttcaataaaattataagcgttaattatttatacattgcttgacttaaaaaaatactcttgcctccccatcttaaggttagcaagagtaaaatctttttaattattcttccatttcagtatttacaacttcttcaatcatgtcccattcttcatcagtttcgattggtactaacttaccaccgtcacctgactcatctggttcattgatcattggtacaagctcaatcatatcgtcttcatctgattgagcaccttcttcagctaagataacatactcttttttgaattcaggatgataaaattctaaaacttttcggtataaaacttcatttccttcttcatcgaataaagttaataattcttcttcgttattaatttctagttgtgaatcatgattatgttcagtcatagtaaaatctccttttaatgtagtgaatctaaatagccttgtaaaataaataccgctgccattttatcaatcacttgttttcttttttgtcttgaaacatctgcttctaataatgatcgttcagcagccattgtgcttaatctttcatcccacatcacaatctcaatagaaggataagcttctaataatttttctttatatgttaacgaagcttcgcctcgaaatcctattgaattattcatgtttttaggtagtcctattacgactgtacccacattatgttttttaataatgtctactaattggtcaatacctaattcattattttcttcattgattcggagtgtgtctaatccttgtgccgtccaacccattatatcactaattgcaattcctaccgttctactaccgacatcgagtcctaaaattttatgttgtaacataaattatttattttgctcttttaaatagtaagaaacaagctcttccataataacatctctatcaatatgacgaatttgatttcttgcttcattttggcgtggaatatacgcagggtcacctgataataaataacctacaatttggtttacggcattatatcctcgttcatctaatgttcgataaacattatttaaaacatctcttacatcttgtgttggaagttcttcatagtcgaatttcattgttttatcaaagttttccatttgcgacactcctttaattacaaatataactcactatcatcatacaatattatggctttaaattatagatttttaatgtaatctttaataaagcttaatgattttgagatattttcaggttgtgtaccgccaccttgagccatatctggacgaccgccacctttaccaccaacgattggtgccatttgtttgataagatcaccggctttaacattatttgttaaagatttagggacagttgcaaccatcgatactttatcatcaacattacttgcaagaatgataattgtatcttgtagtttagatttaaaatcgtccattgtcgagcgaattgctttcgcatttggtacatccacttcagtaaccaatactttatagccattgatttcttcaacttgatcttcaatattacccattttaagtgatgtgatttctttgtcacgttgctctaattgttttaataatgctttttcttcatcttgcaattgtgttaacttatcgactacttgatcatcagatttcactttcagctgtgatttcatcgtattaaatttctcttgaatatcttctaaatataagaaagctgctttacctgttaatgcttcaatacgacgcacaccagctcctgtacctgactcacttactattttgaataaaccaatttcagaagtattgcggacatgaataccaccacataattcaattgaaaatggtgccatatttactacacgcacaacatcaccatatttttcaccgaataatgccattgcgcccatttctttagctgaagcaatatccatttcttgaatgttaacgtcaatacctttccaaatttcttcatttactaagcgttcaacttgatcaatttcatcattagtcattggaccaaaatgagagaaatcaaaacgtaaacgatctgcttctactagtgaaccagcttggttaacatgatcacccagtactgatttcaacgctgcatgtaataaatgtgttgcactatggttcttttgaatgtcacgtcgatcattttggttcacttcagcagacactgtagcgccaacatttacttggccaaattgtactactcctttatgcaagttttgaccatttggtgctttggttacttcactaacagcaatttcaaaattgtcattataaacaatacctgtatccgcaacttgtccaccactgactgcataaaatggtgtttccgttaacatgaagtatactgtttcacccgcttcaacttgtgaaacttcttcaccattatatatcaagtgtgttagtgttgtttgagctgtcgcagtatcataaccaacaaaagtacttgcagatgtaatatttttcaatacttcactttgaacttgcattgattgagaattttgacgtgcttgacgtgcacgatcacgttgttgttgcatttctgactcgaatgttgtcatatcaactttcaatcctgcttgcactgctatttcttcagttaattcaattgggaacccgtacgtatcatacaatttaaatgcatctttcccattaatttcatttgttgtttctttagcttttttaattaattcatttaaaatcgctaaaccatcttctaatgtttcatggaatcgttcttcttcagactttataacacgcttaatgaaatctgctttttccttaacatttggataatatggttccataatgtctgcaacaatatcaacaagtttgtacataaatggctcattgattcctaacgtttgactaaaacgaacggcacgacgtaacaatcgacgtaatacatatcctctaccttcattggcaggtaatgcaccatcagaaattgcaaatgcaatcgtacgaatgtggtcagcaattactttaaatgccacatcttgttcgttgtttactaaatattgtttacctgatactttttcgatttcattcattataggcataaataaatctgtttcatagttagtacgtacattttgagaaactgaggccatacgctcaagccccatgccggtatcaatatttttattaggtaatggtgtgtaactatgatctttattatgattgaattcactaaatactaagttccatacttcaagatagcgttcattttctccacctggatacatttcttctgccggatcgtcttgtccatatgcttctccgcgatcatagaaaatctcagtgttcggtcctgaaggcccttcaccaatatcccagaagttaccttcaatgcgaataatacgactttcttcaagcccaatatctttatgccaaatgttgtatgcttccatatcttccggatgaatcgtaacgtacaatttatctggctccatacccatccatttatcactcgttaaaaattcccaagcaaattcaatcgcttcttgtttaaagtaatcaccaattgagaagttacctaacatttcaaagaatgtatggtgacgcgctgtgaaaccaacattttcaatatcatttgtacgaatagctttttgagagtttacaattcttggctttttaggtgtttcacgtccatcaaaatatttctttaatgttgctacacctgaattaatccataataatgtatcatcatcaattggcactaatggtgcagaaggttcaaccatatgtcctttttcaacaaagaaatctagatatttttgtctaatttcactcgcttttaactttttcatcatttacacatcctatttactgtttttaaattaccattccataaaaattgatgacacagataatcgatttgaaaaactagtataaatcaatatcactttttattattaaaaaataaaaaacgcccatcctcaaaagggacgaacgttatcgcggtaccaccctagttataaatgtaattcaacacatttatcactttaaatcgactatacagttgtgcataaagtagcgttcactaatgtttgttgtacttttcaccaaccagtacatctctgataaacaaatcattaactactcatctttatacgaatttaattctattttagttacatttacgcttgttgtcaacgttctataaagtcatacggcgtgatttctcccatattaatcattggatcaattttaaacattgtagcttccgttaatacatttgtatctgtttttgttgaatcagacgtaacttcttcgctatcattcgatgacaatgaagcttctacttgatcatctattgtcgtttgtgaagctcctgtatcattagttgctgtgttttccagcatttcttcatcttctgaattaaaataatttttcaacaatgtacataattgtgttaaacgcgcttgaccatttgttttcaatccaatatcaaatgcttccggatcaccaagtaaaactaaactcgttttcgctctagttaaaccagtatataatatcggtctttgtaacattctaaaatactgtttaacaataggcatgataacaataggaaattctgagccttgtgatttatggattgatgtacaatatgcatgtgttaattccatcatatcttgtttcgtaaatgtaatttcattaccttcaaaatccacaacaagtacatctttattaagggcattttctttcgcccaaaaaataccaacaataactcctatgtcaccattaaatatgttatcatttggcctattaacaagttgtaatactttgtcaccttttctaaagactacatcaccaaactcaatttctcgtgtgtctttctttttagggtttaaaatatcttgtaaaacttgatttaaacgtttaataccagcatttcctttatacattggtgcaagcacttgaatatcagccatagtataccctttattaacagcactagtaactaccttctcaacaactgttggtatttggtttgcctgacagttaataaaacttctatcatgaaaacgctgtgtaatattaattttctgacccaacttcattcgatgtgctaattctataatgcttgaaccatcttgttgacgatatacttcagtcagattaactcgtggtatagctttcgattcaattaaatctttaaatacttgaccagggcctacagaaggcaattggtcctcatcacctacaaatatcaattgtgcatctaaaggaactgcacttaaaaattggtggaacaaccaagtatctaccatagacatctcatcaatgattatgagtcgtgcgtttatttcattttctaatatatcctctggctttgtgtcttgattccaacctattaaacgatgaatcgtcattgcttctaatccagttgactcttgtagtctcttggacgctcttcctgttggcgctgctaatacaactggataatcatcattgacataatcatcataatctaatgataaaccatgaatctcagcatataattctacaatgcctttaattactgtcgtctttcctgttcccggtccaccggttaatagcatcaccttagaattgatagccgtttgcaaagcttctttttgtgaagctgcatagttcacttgattcgcatcttctatttcaccaatatgcatttgtaaatctgactgttcaatttccgtaagtttatttgtatgcgtctttattctgaataagttttgaacacttttgatttcagaataatacaaacttggaattgcaacttgttcattgtcaataattagtcgtttttcctcatttaagtattgcaacatttcgtctaatttttcaggttcgatgacttcttcatcttgataatttaatacatcaacggttaagtctataacaacattgataggcaaatatgtatgtccctgtttaatacattcttcttctaacgtatagagcaacgcagcttttaatcgttcattatcgttataagcgataccaatatttctagcaagttgatctgctttattaaaaccaatacctttaatatcataaatcaattgatatggatttcgatctaaaatagtcagtgtatcaccgagataaaactgataaattgccattgaaagtttaggaccaaaccctaaatcatgtaaacgaatcattattttttcagattcttgatttgctgaaatttgttctgcaatttgtttctgtttctttttagataatcccgaaactttttctagaactgaatggtcatctaatatatcatttatcgcattatcacctaatgtattaacaatattttgagctgtctttttacctactcctttaaacaaatcgcttgataaataacttataattgcttctttcgtttgtggcatttctttttcaaaagtctctgcttttaattgtttaccataacggggatgatcaacaacttgacctttaaatgtgtagacatcgccttcaacaatattcggaagaaaccctacaacagttggcattgtatcaaagtcttcatttgtttcaatagtatctactttaagcactgtataaaaattatcactgttttgaaacaatatcgcttcaacagtacctttgatcattgaataatcaaatagtgtagggtctgacatgttactcctcctctttcattttagtgaatgttttcagcgcatgctgacttaataagtgtttagggtcgatagtcacagcttctttaaaatgagttatggcttcatcaatatcttcatttttcataaataacgctaaacctaaattgtatcttgcatcaacatgatttttatcaatcgttaatacatgtttaagttgagttatggcttcattaaacatttctaattgacataatacaagaccatattgaaattgaacttctgcatctttgtctttatctagttccgcagcagtcattaaatacggcaatgccagcttaaatgattctaactgattaaacgccataccgatcatataattacaatctacttgttcaatctctgtttgtaatgcttgttgatataatttaatagcttcttgataacgttgctgattataatatacatttgctagattataaaatacgacgccattcttcgaatctattgttaaagctttttggaaaaaacgctctgccttttcaatctcattcgcatcagcaagtacgataccggcattaatataattttcaataattgtaggatcttcttcgatatttccgaacaatgcttgtaacgcttcttctatttttccattttgtatgtattgataaattgtttgttgatctatcatttacgaacctcatttctcatcaattataacatcttgataaattgtatgtctcgaatcacttaacaacgaataaaatataatctaatatcatcttcattcatgaaaaagcgggaatggaatagaaatgctaaagaaccattaacggtttattatgtaatggttcttccacattagccaccactattatgtacttaaaaataggaatacataattagactcatgcatagggagtgggacagaaatgatatttttacaaaattaatttgtttaccccaacttgcattgcctgtagaatttctttacgaaattctctgtgttggggccccgccaactcgcacgttattgaaatctgactttccgtcagcttctatgttgggaccccgtcagcttctgtgttggggccccgccaatataacattgtagagcctaggacattgtgatgtcccagactctatcatcatgaattattctcatcaaaaactgtctttcgtcatttccaacgctgaaacttcaaataagtaatttattgttgccattgtttatacaacataatttaattgaccttcatttttgaacacatcgtcaattgttgctccaccaagacacacatcaccttgataaaaaacaactgcttgtccaggtgtgattgctcttactggctcagcaaaagtaacacgcagtgcatggtcgttttcacgtttcacaaaaactttcgtatctttttggcgatatctaaatttagctgtacattcaaaaccttgatctaagtcattatcttctggatttacaaatgaatagtctgaagcaattaagtaatcactgtataatgcatcgtgatggaatccttgttctacatataaaacattatcttttagatttttaccgacaacaaaccaaggatcgccatctccacctatacctaaaccatgtctttgtcctattgtgtaatacatcaaaccactatgtttacccattttcttaccatcaagtgttatcatatcacccggttgtgcaggtaaatattgtgataaaaatgttttaaagtttttttcgccgataaaacaaatgcctgtagaatcttttttcttagcagtaacaagtccttgttcttcagcaattcgacgcacttcactcttttcgatgtcaccaattgggaacatcacttttgaaagttgttgttgagataattgattcaagaagtatgtttgatctttattattatctacaccacgtaacatttcaacatgaccatcttcatgacgatgtatgcgtgcgtaatgtcctgttgctacataatctgcacctaaattcatcgcatgatctaaaaaggctttaaacttaatttctttattacacataacgtctggatttggagtacgaccttttttgtattcatctaagaaatacgtaaagactttatcccaatattctttttcaaaattaacagcgtaatatggaatgccaatttgattacacacttcaataacatcgttgtaatcttcagttgcagtacatacgccattttcgtcagtgtcatcccagtttttcataaatatgccaatgacatcataaccttgttcttttaagacgtgggctgttacagaactatctacaccgcctgacataccaacgacaacacgtatatctttatttgacaattatgactcctccttaaatttaaaatatattttatgaatttcagctacaattgcattaatttcattttcagtagtcaattcgttaaaactaaatcgaatcgaatgatttgatcgctcctcatcttcgaacattgcatctaaaacatgcgacggttgtgtagagcctgctgtacatgcagatccagacgacacatagatttgtgccatatccaacaatgttaacatcgtttcaacttcaacaaacggaaaatatagatttacaatatggcctgtagcatccgtcattgaaccatttaattcaaatggaatcgctctttcttgtaatttaactaaaaattgttcttttaaattcattaaatgaatattgttatcgtctcgattcttttctgctaattgtaatgctttagccatcccgacaatttgtgcaagattttcagtacctgcacggcgtttcaattcttgttcaccgccaagttgaggataatctaatgtgacatggtctttaactaataatgcaccgacaccttttggtcctccaaacttatgagcagtaatactcattgcgtcgatctcaaattcgtcaaacttaacatcaagatgtccaattgcttgaaccgcatcaacatggaaatatgcatttgtctcagcaataatatcttgaatatcataaatttgttgcactgtgccaacttcattatttacaaacataatagatactaaaatcgtcttatctgtaattgtttcttcaagttggtctaaatcaatagcacctgtatcatcaacatctagatatgttacatcaaaaccttctcgctctaattgttcaaaaacatgtaacacagaatgatgttcaatcttcgatgtgataatgtgattacccaattgttcatttgcttttactatgcctttaattgccgtattattcgattctgttgcaccactcgtaaatataatttcgtgtgtatctgcaccaagtaattgtgcaatttgacgtcttgactcatctaaatatttacgcgcatctcttcccttagcatgtattgatgatggattaccataatgcgaattgtaaatcgtcatcatcgcatctactacttcaggttttactggtgtggtcgcagcataatctacataaatttccatgtttggacactcctcacaattttatcaatgttccaataatagcaccttacatactatttttctacttttctgtttaactttatttataatgtttttaattatattttaccattttctacacatgcttttcgataggcttttttaagtttatcgctttattcttgtcttttttataaattttagtatttgcagatattttttcatttgtaaaatgtaacgtactattattttggttatgagcaatttaatatttatctggttattcgattggtatacttcttatatcataaaaaaggaaggacgatacaaaaatggcgattaaatattcagcattaaacctagtccctattcgagaaggtgaagatgaacgaacagcaattaatgatatggttaagctcgcacaacatttagacgaattatcatatgaaagatattggattgctgaacaccataacgctcccaacctagtaagttcagcaactgctttattaattcaacatacgttagaacatacgaaacacatacgtgtaggttctggaggaatcatgttacctaaccatgctccattaatcgttgcggaacaatttggcacgatggcaacattatttccaaatcgtgtcgatttaggattaggacgtgcacctggaacagatatgatgaccgcaagtgcattaagacgagatcaacatgatggtgtttataaatttccagaagaggtttcattattacaacaatatttcggccctgctcaccaacaagcatatgttcgtgcttatccagcagtaggtaaaaatgtgcctttatacattcttggttcttcaacagattctgcacatttagctgctcgcaaagggcttccatatgtgttcgctggacattttgcacctcaacaaatgaaagaagctatcgaaatttacaaaacgttatttgaaccttctgatgtcttagacgaaccttatgttattgtatgtttaaatacaatcgttgctgaaaatgatgacgaagcacaatatttagcttcatctatggcacaagtaatggttagtatcactcgtggcagaatgcagcccgttcaaccgccaacacatgaactacaaaatatattaacgccgagagaatatgagatggctatggaaagacagaaaatatcattaataggttcagaaaatactgttcaacaaaaaattcaagattttatggaaacttatggtgaagtcaacgaaattatggcaataagttatatttatgataaagatatgcaattagactcttatcgtcggttcaagaatgttataaatcagataaatgaaaaaaacactttttaatgtgataaataaactaagtgaaagtatgtatccataatattaataaaaataaacagtaacagcattttgaatgaaagatgtctttattgttcaatcatttattttagtaatgattcaaattcacttaaaattctaatgcaaatatgaaagcgccccttcaactttacactttgtaagtgtttatttgatggggcgctttcaaaatattgaaaagcatatccaaaatttaaagaaatttatttctctttatcttcattttcttttttctctacgttattcgatcctgtatattcatttatcttatcttttacatttttaacttgttcattatcgctatttttaaatttttctactgcgtctttagctttatccataaaactcatattaatcgctcctcttatatttgattagtttaattgaacttattttttaagtttatcaattgcatcagttattttgtttttagcattttcaacaacttcttttgctttaccagtcgctttatcttgctgaccttctttttctaattctttgttatcagtaacgttacctactgtttctttaacattgcctttaaattgatcgaacttactttcgtctgccatagtgaaacctccttagatgtatatatttatataccacaaaggaggttcgctaaacattataatatgaagtttttatgttatagtatagtatttatacgattaaatataaaacatgtatccgtctaaatcttcacttgtatctacatattccgctaaatatttcaatgttgtattatctaaaacatctctcactgcatctctcatgcgaatccatagttgtttttgcgcaggtggttctgattcaatactttcaacaaatgtaattggaccttctaacagtcttataatatcccctgctgagatttcttccgctggtactcttaattggtatccacctttagcaccgcgtacacttcgaattaaccccgcatttcttaaaggacctacaagctgttctaaatataaatcactcaaattattttcttcagcaattgactttaatgatatacatccttgcccctcttttttagcaagagaaatcatcaatgtaagtccatatctccctttagtagaaattttcattgtataacctcacttaattcgaatattgatattcccattttagcattttttgagttaagatagtataagaaaggtgtgacaaatgtgagtacagaaccattagcatcgagaatgcgcccaaaaaatatagatgaaatcatttcccaacaacatttagttggaccaagaggcattatcagaagaatggttgatacaaaaaaattaacttcaatgattttttatggtccacctggtataggcaaaacaagtattgccaaagcaatttcgggcagtacgcaatataaattcagacaattgaatgctgtaactaacactaaaaaagatatgcaacttgttgttgaagaagctaaaatgtctggtcaagttatcttgttattagatgaaatacatcgactagataaagctaaacaagactttttattacctcatttagaaaatggcaaaatcgtcttgatcggtgctacaacttcaaatccttatcatgctatcaatccagcgattcgttcaagagcgcaaatttttgagttatatcctttaaatgatgaagatgtgcgccaagcgttaactcgtgcaatagaagatgaagagaatggtttaaaaacatatcaacccaaaattgatgaagatgccatgacctacttttctacacaaagtcaaggtgatgttcgtagtgcgttaaatgcattggaattagctgtattaagcgcagataatgacaaagacggttatcgacatgttacattgcaagatgctaaagactgtttacaaaaaggtgcatttgtaagtgataaggatggtgacatgcattacgatgttatgagcgctttccaaaaatctatccgtggtagcgacgtcaatgccgctttacattatttagcacgattaattgaagctggagatttacctacaatagttcgacgattacttgtaattagctatgaggatataggcttagcctcacctaatgctggtcagagaacacttgctgctattgaatcagcagaacgtctaggtttaccagaagctagaataccactaagccaagcagtaatcgaactatgcttatcacctaagtcaaattcagcaatgagtgccattgatagtgcattgtccgatattagaaacggtcatgtgggccaaattccaaaccatttaaaagatggacattatcaaggtgctaaagatctaggccgatctattggttacaaatatccacaccaatatgttaatggctatgtttcacagcaatatttacctgataaactaaaaagcaaaatttattatgaaccaaaaacgacatctaaaagtgaacaacaactcaaagaaatatataacaacttacttaaacaaaggccgtaaaaataagattaaatcgattacctttgatattttagctataatcaaatcaaaactgactagtacacaaggcatattctactatgcttgcgaactagtcagttttagttttatggtgtggttacacttgccttacgttgaaagttatccctttcaaaattaattattgccctttgtctttaatgcgacgaactggaatatcttttaatacgtcattcactacataacttgcacaaattaatccaacaacacttggcacaaaggcatttgaagaaggtggcatttgtccttttcgattgatagcatttttatctccaactatatcttttacatcttctcttatgacaattggactttcatctgaaaatacaactggaatccctttacgaatccctagtttttttaatttttgacgaataattttggccattggatcggtatgtgttttagagatatctgaaattgtaaaacgtgttggatctgttttatttgcagcacccatactggaaatcactttaatccctcggtcaagacactctttcattaagtgtactttgtacattattgtatcacttgcatctacaaaataatctatatcgtaattatcgaaaatttcttcatatgtctcttctgtataaaacatatgtaaaggcgtgactttacaatctggattaattaatttaatacgttcttccatcaaagaaactttactttgtcctaccgttgtagttaaagcgtgtaattgtctgtttacatttgtaatatcaacatcatctttatctattaatataatatgaccaatattcgttcttgctaatgcttcagcagcaaatgaaccaacacctccaacgccaagtatgacaactgtttgttgcttcaataaatctaaaccttgttgtccaatcgctagttcatttcttgaaaattgatgtttcattattttacctctttcactgatttatacataagtacatagtaacttaaaattttatatttagcattattgctttgattatttttccaaaattcaacgaagaaacaattattaaacgctattaaacccaactaattctttattaaaaacttaaagaaaagcataaaaatacgcaagacaaagtcttgcgtatcgatagagtccgtattgccgtagttataatagcttgatcattcggcctgttatatacaggtgggtgccctgtttcttgttttgtacgtccttcatataaggcgtgtacgctgcaagaaaacctattgggctcccttgatcaaagagtgttaggcccaaattaaaaagcaaacttacgaacaactcagatgactatcttatgatgttatattaccacataattaaaattaatgaaattataacaaaccaaagtttattgatttttttaaatttagtgacgaattcgcaaagaaagttcttctaattgtttatcagaaacttcaccaggcgcattcgttaataaacatgtagcagatgctgttttagggaatgcaattgtatctctcaagtttgttctattagtcaataacatgactaatcggtctaatcctaatgcaataccgccatgaggtggcgcaccatatttaaatgcatctagtaagaagccgaattgttcctgcgcttgttctttagtaaatccaagaacttcgaacattttttcttgtaactcaccatcatgaattctgattgaaccgccacctaattcataaccatttaatactatgtcataagcatttgcctcagcttcttctggcgcagtgccaagcttagcaatatcagcttcttttggagatgtaaatggatgatgtgctgcaacgtaacgtttcgcatcttcatcatattctaataatggccaatctgtcacccataagaagtttaattttgtttcatcgattaaacctaattctttagctaatttgacacgtaatgcacctaaactttgtgcaacgacatttggtttgtctgcaacaaacattactaagtcaccagcttcagcaccagttaatgtaagcaatgtttcaacattttctgtttcaaggaaacgtccaattggacctgtcaaaccatcttccacaactttaacccacgctaatcctttagcaccatagatgtttacaaattctgttaaagcatccatatctttacgtgtatattgttcagctgcacctttagcgacaattgctttaatttcaccatcattttcaacagtatctttaaatactttaaagtccatatcacgtcctaattgagaaacgtcaattaattccatttcaaaacgcgtatctggtttatcagaaccatagcgacgcatcgcttctttatatgtcatgcgtgggaacgcgccattaatttcaacgcctttaacttctttaacaacttttttaagcatttcttcacccatttgcatcacatcttcttgatctacaaaactcatttcaatatcgacttgtgtgaattcaggttgacgatctgcacgtaaatcttcgtcacggaagcattttacgatttggtagtatttgtcaaatccgctaatcatcaatagttgcttaaataattgtggcgattgtggtaatgcataaaattcaccatcatggacacgagatggtactaaatagtcacgtgcaccctcaggtgttgacttcgttagtactggtgtttcgatgtcaaagaacccttcatcatccaaatattgacgaatagaacgtgtaatttgatgtctcattttaaatgtttgcgctaactcttgacgacgtaaatctaaataacggtattttaatcgaatattttcatcaacgttaacattttcttcatttatagaaaatggtggtgtctcagatttattaatcactttaatatttgtaacttgtacttcaacttggccagttttaattttaggattaactgtttcagggtcacgcttcgtaactgtcccttgaacttctacaacatattcagaacgtactgtttcagcaattttcaatgcctcttctgaaaatgcaggattaaacacgacttgtacaattccttctctatctcttaaatcaacgaaaatcaatccacctaagtcacgacgattgttaacccatccttttaatgtaatttcttgtcctaaaaatgcttcagtaactaatccacaataagttgttctcttactcatattttaacgccctctctacttcttaaaatattcgactaatgcgtctaattcaattgtttcagattcaccagttgtcatatttttaacatcgattttattattttctaattcttgatcaccaataacgattgtaaacttggcacctaaacggtctgcttgtttcatttgtcctttaattttacgctgtaagtagtctttatctgctttaataccattatgtctcaaatgatttaataacttcacagcatatcgatctgcttgatcacccattgtaacaatgaataaatctaagttttcttcaatatctaattcgataccttcttcttcaagtgcaagcaataatcgttctatacttagcgcaaaaccaatacctgtttcgcttggaccatctagcaattctaataaaccattataacggccaccaccacaaagagttgtaatggcaccatcatagttagggttatccatcattaattcaaatgctgtatgtgtataataatccaatccacgaactaagttaggatcttcaatatatggaatacctaaatcatctaaataagcttttacttgttcataatatgccttagattcctcatttaagaaatcagtgattctaggtgcagtcttaatcgcttctttatcacggtctactttacaatccaaaattcgcatcggatttgtatgcaaacgtgattgacaatctgaacaaaattcatgaattactggttcaaagtgtttcactaacgcttcgttatattcttttcgagacgccatatcccctacactattaataacaagctttaaatgttttaatccaaatgattgataaatatgcataaccatagctaatacttctgcatctacgctaggattttcagcaccaatagcttctacaccaaattgattaaattgacgatagcgccctttttgcttacgttcatatctaaacatcggtccattgtaataaagtttaattggttggtttggattaccttgcattttatgttcaatatatgaacgcacaactgcagctgttccctcaggtcttaatgtaatacttctatcgcctttatctttaaatgtatacatttctttttgtacgacatcggttgaatcaccaacacctcttgcaaaaagatctgtactttcaaaaattggtgttcttatttctttataattataaaatgtcattaattcatctaattgattttcaatgtaacgccatttctttgaatcttcaggtaaaatatcctgcgtccctctaggtattttaatcattttgacatctccctcggcaaactattttatttaattacctttttaaaactaaaactatatacgaccacttaactttgcacgataaatcataattttaaaagcaaaagaaaaagcccttgcacagcctgaaactgcacaagggacgaatatccgtgttgccaccctcattggtttaaaaaacatgcctaattgtaatcatcattactttttataagcgtgcatttaataaacccactcaaaacgtttaacgtacgtttaacggctttacttttcataaagcacctcttcttgtgttcaatgtatataaactactcagcataatctttcagtctatggattatattcctacacaatcttagttagattgctacctatttcatttaccatttcaagaatacaaacggttttagttataaaattcaatatcaatgataactactttcacatatttttgcaagccctacgcagaaaaataaattttaaggccatcaacaattgcttgttctaaaatttgtctatgtaattgatctttaatcatcgtttcatcagttgggttactaatataacctaattctaataaaacagcaggaacttttgtttgtcttaacacttgataattttcttgtcttgaaccgcgattagaaagtagacctttcttctgaatcgtagcgtctaacgtatctgctaaagctctttgattatcatgataccaataaactgtcattccatttgcattagatgattctaatgcatcattatgtatactcaaataggcatcgcctttgatatcacgattttctagtgaaacatatgtatcgtctgttcttgtcatcttaacagttgcgccttctttttctaaagtgcgctgcaattcttttgctgttttcaacgtataatctttttctaagcttttatatttagtattgcttgaagcaccctggtcactacctccatgaccaggatcaagcactattgttttaccttgcaaaggatttttctcctttgtattatccgcgacaatatctaaatttgtgtgccatccagctatccaacctttttcattactggatgtatcttcaacttcaatccatttacctactttaccaatctttttaaaatggtcacctttctcaactttgtaaatgactggatacgcagcgtttggacctgtacgtaattcagcattttcagttatcgtaatgttcccactatcttcactattgctattcagcaataaaaataaaaagatgataaataagacaaaggcaatcactactattagagtacgtttatttttaagaccctttttagataaccatgcctctatttttttcattgaattttgccgtcctgactttcataaataatagtgactggaccatcattatttatgttaacattcatgtgtgttccaaattcacctgttttcacagtaagaccatacgctcgtagcgcatcattaaaatactcatatatttttactgcttgatcaggatttttagaacttgagaaacctggacggttacctttttttacatctgcatagagagtaaattgtgaaactgatagtatttcaccattcatttgttggatattaaagtttaatttattattgtcatcttcaaataatcttgcattagcaattttctttgcaattacatctgcatcttgctctgtagagtcctgaccgataccgactaataaacaatatccttttttgatttgattatttaatgtatcattcgtcaccgatgcttctttaactctttgtacaactactttcatattttgcacctctagttccaaactcttgttactgtataaacatcaccaagttgtttgatcttttctaccacacgataaacatcattcacgtttttcaccatgacactaatatttattattgcatttttatcaatatctgaacgtcctgaaactttaattaaattgccggctgtcgagctaacagcttgtaggacttcattcaacaaaccatttcggtcatacgcagttacctctaaatcaacctgatatttttgagttgcgtcttttgattttacccattcaacattaattagtcgttcagtttcgttcttaatatttgggcaatcagtgcgatgtactttaataccgtgacctttggtgatataacctacaatatcatcacctggtataggattacaacattttgacaacttgataagcacattttctaaaccttctacatagacaccactatcagtaatgatgttgtctttaataggcaatgatttcgtaacttcttgtgcttcatttaaagcacgttgcttatctaaaatacgttgtctttcagttaatttattaacaatctgtaaggatgtcacgccgccaaatcctacagctgcgaataaatcatcttcatttgcaaagttatatttttcattaacaacctgaatatttttctctgtcaaaatatcttcgactctaaatccttgctcttttatttcagcttcaaccatcattcggcctttttcaatattagatgaacgatcttgttttttgaagaaacttttaattttacctttggcactagatgatttaacaatttttaaccaatcacgacttggtccatatgaatgtttactagtacgtatttcaacaatatcgcctgtttgtaaaatatagtcaattggtacaattttgccattcaccttggcaccaatcatcttattaccgacttcactgtgaatcgcataagcaaaatcaatcggcacagcaccatatggcaactcaataacatcactcgctggggtaaatgcgtatactttgtcactctgtaagtcatattttaaggtttccataaattcttgagcgtcagacgatgtatgatccgcttcagctaattcttttaaccaatttaacttattttgataagtttgatctttttcacttacttttttaccttctttgtaagcccagtgtgctgcaacaccatgttcagcaatttcgtgcatatcaaacgttcgtatttggatttcgagcgggtctccatttggacctactactgtggtatgcaatgactgatacaaattttgtttaggcattgcaatataatctttaaaacgtcctggcatcggtttccataacgtatgcaccaatccaagtatcgcataacaatcattaatagaattgacaataacacgtatcgccaacaaatcaaaaatttgatcaaattgctttttctgcttcatcattttccgataaatgctgtaaatatgtttaggtctaccatttatatcgccttcgatattcattcggtccatttcagtacgtattctatcaatagccgtttcgatatacgcttcacgttcactacgtttcttcttcattaaattgactattctaaaatattgtacattatcaatataacgaagagccgtatcttctagttcccatttgattgtattaataccaagacgatgtgctaaaggtgcataaatttctaatgtttctcgagaaattctaatttgtttttcacgcggcatggctttcaaggtacgcatattatgtaatctgtctgctaatttcaccaaaattacgcgtacatctttggcaatcgcaataaataacttgcgatgattttcagcttgctgttcttcttttgagcggtattttacttttttaagtttcgtcacaccatcaacaattcgagcaacttcttcattgaacatttcttttacatcttcaaatgtatacggtgtatcttcaattacatcatgcaaaaaacctgcgacaatcgtcggtccgtctaatcgcatttctgttaaaatacctgcaacttgtataggatgcataatgtatggtaatccgttttttcggaactgacctttatgtgcttcataagcaatatgatagctttttaaaacatactcatattcatctgctgacaaatatgattttgctttgtgaagaacttcgtctgcactatatggatattcgttgttcattatatgatacaccccattcatatttattacttcgccttaaacaatgatttaggtactcttgttgaatagtatttgtcccacaccaatcatacgtccgtcgacgataaatatttatcctgtcgtcattaatcgtaatattaattttacttgagcgagtttaatttgtatactattcctacttttaaaacttttacaaaaattcgacctaaatctactgtttcattttttaaatattagttctatgatactacaatttatgaaataaataaacgatgttattaaggtataatgctcaatcatctaacattttcagtaaataaaaaatcctaacatctcatgttaagaaaacttaaacaacttttttaattaagtcattcgttcttatacatttgatgaaggatttcatttgataaaattatattattttttattcgtcgtatgagattaaactcataacatcgtaatctttaattttttcaataccatttaaatatttcaattcaattataaatgcaatacctactacgataccgcctaatttttcgactaattttattgctgcttcaatcgtaccaccagtagctaataaatcatctgtaattaacacacgttgacctggtttaattgcatctttgtgcattgttaaaacatttgtaccatattctaggtcatactcataacgaatgacttcacgaggtaatttcccttcttttctaacaggtgcaaagccaatccccattgaataagctactggacagccaatgataaagccacgcgcttcaggtcctacaacgatatcaacatctctgtcttttgcgtattctacaattttatctgttgcatagccatatgcttcaccattatccataattgtagtaatatccttgaaactaacacctggtttcggccaatcttgaacttctgatacgtattgctttaaatccattaatatttcctcctaaattgctcacgacaattgtgactttatccaattttttatttctgaaaaatcttgatataataattgcttttcaacatccatacgttgttgtcttaattgatacactttgctggaatcaatcgatcttttatcaggttgttgattgattcgaattaaaccatcttcttgtgttacaaaatttaagtctaagaaaactttcaatatgaatttaagtgtatctggtttcacacttaaatgttgacacaataacataccctctttctggatatttgtttcttgtttagttattaatgctttatagcactttttaaaaacatccatattaggtataccatcgaagtaaatcgaatgattatgttgtaaaactatataaagttgagaaaattgcagttgttgcagggaattagacaaatcttccattgacgttggtaaatctcttaatactactttatcagtttgttgtttaatttcttcaccataataatattcattcgcatttactttatcacttttaggatgaataagcacgacaatatttttatcattttctgtaaaaggtaaactttttcgcttacttctataatctaatatttgctgttcgttcatcgcaatatcttgaataattaattgcggtgattgattaccattccattcgttgatttgaacagaacctaatatattaattggttgttcatcttgtaactcaggttctaagtgtccattttgccaaaatagtgcggcgatattactttcaccaagtgtcaattttagatgatttttttgttgacctatcgccttaactgaagaaactgataaatcatccatttcaaaaataggtctagaaaaatctgttccgaagggtcttaaacgattcatatcacgaatatttttaatcgttatatcattttctgttaataatacatctactggctttacgggatctaacgaagttgtttcagataattctttcatccatttatttaaaccttcagctaacgattctatattttcaatatccatcgtcatacctgcagccatatgatggccgccaaatttagcgattaactcttggtgtgctgatagtatttcaaacatcgacacttgatcaattgatctggcggaaccttttgcatgattttgctccctatcaatatttaaaattaatgttggcaaagcaaacgtttcgacaattttcgaagcaacaatacctaagacaccttcatgccaattttcttttgctaaaagtaaaaataaatctccatttttaactttcatttctgccattgccattgcttcttctgtgatagttgctacaatatcttttctttcacggttaaaatgttcaacttgttctgctaaaaatgcagcttcttcttcgtcgtcagtcatcaacaattcgcaagctaatgatgcgtcatctaaacgacctacagcattaagtctaggtccaataataaaaccaattgtttcttcatcaatattgtcattgtatcccgcttcttttagcaatgctttaacagaggtcggacattgatcatttaagacttttaatccttgtttcactaatgatcgattttcatcagttaaggatactaaatccgcaatggtacctatcgcaactaatgctttaaaatagtcaggtacattttcaatcaatgcttgtgctaatttgtacgcaactcctgcaccacacaattgttggaacggataattaaacgatggatgcattggatgtacgattgcatatgcttctggtaatgtactaccaatttcatgatgatcagttacaatgacatcaactcctaaatcttgaaccattttaatttcattatgaccttgtatgccattatcaacagttatgattaatgttatgccttcatcatgagcatttctaaatgctagttcgtttggtccatatccttcggtaaagcggttaggaatatgccatcctacttgtgcacctaaaagttgtaatgttgtcactaaaattgtagttgaggtaacaccgtcggcatcgtaatcaccataaactaggattttctcatcattcgctatcgctcttttaattctttcaatagtctttgtcatatcgctcaattgcaatgaatcatgattgatatctgtatctgaaatgatggattcaattgcttgttcatcaataatcgatttactttctaatattttttttacgattggcgttaactttaattttgatgttaattcatcacttatgtattcagttggtttaattaatttccacttatacttcggtttaatcatatatatttacgcctcatttccaaaagacattatatctaaaattactttaaataaaaagcacttatctaaataatcaagactttaattataccattttttaaaaatgaatgcgggaacttatttatatatattttgttaaatttaaacaaagtaaaaagcggtatgtgaactctttattgtttcacataccgcttaattcattttaaactaaaatcttttcatcgttcgatttcttttctttatatacaactaatttgtgtttcggcgattttttcaactgacgttttttcatcattccccatagcggaacggcaatgaagattgaagagaatacaccagaaatcaatccgataaataatgctaaagtaaagttgaatatcgtaggagcaccgaagaatagtatagcaactactactacaataactgttaatactgtattaattgaacgtgtcattgtctgtctaattgatctattaacaatatcatcaatttgttctgttgtcgtaatcactttaaccttttgtaagttttcacgtacacggtcaaacgttacgattgtatcattaattgaataaccgacaattgttaatacagcggcgataaatgttaaatctacttcaattctaaataaactgaaaatcgctactataatgaatacatcatgtaataatgccaatacagatgaaagacccatgcgccattcaaatcgtaatgatacatagatgatgatacctatcgatgcatagattaatgcaagcattgcattttttgctaattcctgtccaataattggtgatacagtgttaatttgaggtgtgtcaccgaatttcgatttaatattatcactcaatttattatcttgagcacgcgttaaatcgtctttaaattgaacagttgctactttattatctttaccattgatttgaatttgatctgctttaagtccactatcttttacaacttgctcaaccttttgttgagtaattgcttgtttagattggaaatctacacgtgtaccacttgagaaatcaattcctaggtttaacttgaagatataaagaataactaaaccgacaactacaattaaaatacttactccaattaatggcttagctaatttaacaaaattccatttctcgaatgaagttttaagatcatgaacatctacaccttcattaatatcatgtcgtttattctttttaacaccaaataaccaaaattgatttttgaatatatttgatgaaacaagtaatgataataagaatcttgataagaacacggctgtaacaaagatcattagaatacctaataataacattgtcgcgaaacctttaactgaactttcaccgaagaagaataatactgctgcggcgataactgttgttaagttagaatcaaaaattgttaagaacgaacttttgtttgctttagtaaaggcttgctttatcgttctacctattcgaagttcatccttaatacgctcatacatgataatattggcatctacagccatacctacacctaataccaacgccgctaatcctggtaaagttagaaccccagaaatgaaattaaacgctactaacgttagatagatataagttgtcaatgcaataatcgctactaaaccaggtaagcggtagaatccaagcatgaataaataaattaatgctacaccaataaacgatgcaaacacagttttatctaatgcatcttgaccaaattgggcacctactgagtttgaataaatttctttcaagtcaactggtaaagaacctgcatttaacaattcggcgatttgttttgcttttttaacgccttcttgtcctttaaatccaccagagatttctacgctatcagaattgattggttgatcaacacttgctgcagaaataaatttagggtttttcttttgtgcttcttttttatagctgtcaccttttttgaaatctaaccaaacaaccatgacattatcacgtttcttagagatttcttccgttacttttttaaatttgtttttgtcttttactttaaaagtaactgtaggctggtttgtttcctgtttaaattcttgtttggcagatccctgtttaatatcagaaccgcttaattttactttatcttctgcatcgcgaattgttaaattagcttgagaagataaaattttacgtgcttcattctggtctgttacaccagcaagttgaactctaattctattaggttcttcaacttgaattttaggttcggaaacacctaaaacgttaacacgattttctaatgtttgcgctgttgattgtaaggcttttttatctattttgtcgcctttatttaaaggatcgacttgataaagcacctcaaatccaccttgcaaatcaagtcctaaattgacattctttataacacttttataagttgcagccattccggcaaacaacaatacgactaaaagcaagaacgcaattattctactacttttcttcacatgaacacctcattatttacgtatgtatttagaatacttgaatactattttataacgcaagttaaatctttcttacaaaatttattagccttatacatattaacatactagagcagggagtaaaaatagtcatagatatatttaatttaaatttaacaattattatgtatcacaatttctttttttggaataaaaataagctattctacatactacttataacttaaaaaggatgaaacgctattcgtttcatcctttttaataccacttcttgttatgaagggtcaacttgtttaatagcaggtttttcgaaagttaattcagtaccatgaccattaactgtaataacaacagttgtttcatctactgctttaacagtacctttaataccaccaatagttgtaattctttgaccagattgaatgttattaatcaactcacgatgctgtttcgcacgtttttgttgtggtctgatcatcaagaaatacataaccgcaaaaattacgactatatatattagtaatgaaaattgcattttatacgctcctcttgcttaaaagttttttgggttctcaacatttaatccatattgctcgaagaattcttctttgaaatctaaaagacgatcttctcgaatggcttgtcttatatcttccattaattttagcagaaaatgtaaattatgaatagtagtaagacgaataccaaaagtttcctctgccttgattaaatgacgtatatacgctcttgagtagttttgacatgtataacagtcacaattctcatctaacggtcttaaatcatctgcaaattttgcatttttaataactaaacgaccttgcgatgtcatacaagtaccatttctggcaatacgtgtcggtaagacacaatcaaacatatccatgccgcgaatactacattcgattaacgcatctggagatcctacacccattaaatatcttggtttatctttaggcataaactgctctgtatgttcaaccattttatacataaccggtttaggttcaccaactgacaaaccgccgattgcataaccaggaaaatctaattctactaaatcctttgcactttgttctcttaaatcttcatattcgccaccttgtataatgccgaacaatgcttgatcttcaggtctttggtgtgcatctagacatcttttcgcccaacgtgttgtacgttcaatagatttttttacataatcatattcagcaggcatcggtggacattcatcaaatgccatcataatatcagaacctaaatcattttgaatttgcattgatttctcaggactcaaaaataatttagacccattagtatgatgtctaaattccacgccttcttctgtaattttacgtaaattacttaaactaaacacttggaaaccgcctgaatctgttagaatcggaccatcccaattcatgaatttatgtaatcccccagcgtgtttgataatatcatttccgggttgtaaccacaaatgatatgtgttgcccaaaatgatttttgcttcaatttgtcttaactcttctggactcattgttttaacggttgctttagtaccaactggcataaacataggtgtttcaaatgaaccgtgtggtgtgtgcacgatacctaaacgcgcacctgattgtttacaagttttaatgtgttcgtatgttactgcaggcatattcaaaatcctcacattctttttatataattaacattgcatcgccaaaactaaagaatctatattctaaatttactgccgttttataagcattcagaacattttcacgagtactaaacgctgatactagcataactaatgttgattttggtaaatgaaaattagtaatctggccatcaattgctttaaaatcaaatcctggataaataaatatattagtccagccactcgtttcaacaaatttatcatgatcgcgtcgaattgtttcaagtgtacgtgttgaagttgtaccaactgatataatacgatgtcctttggacttagtatcatttaataaatcagctgtttcttgtgccatttgataatattcactatgcatttcgtggtcattcacatcgtcgacgctcaccggtctaaacgtacctaatccaacatgtaatgtaacaaatgcgatattaacacctttatttttaatttcagttaataactcatcagtaaaatgtaatcctgctgttggtgctgccgctgaaccactttctttagcgtaaactgtttgataacgatctggatcatctaaacgttctttgatgtatggtggcagtggcatttcccctaattcatctaatctttcttgtaaaataccttcataatgtaaacgcatgatgcgtccaccttgatccatttcttttatgcattcagctataattttgccattaccaaaattcaatttattaccaactttaatacgcttagctggtttcagtaagacttcccaatcattaccttcaatttgagttagcattaacatttcaacttttgcaccagtttcttctttcaaaccaaaaagtctagctggcattactcgcgtatcgttaagcactaatgtatcaccaggtctaaaatactcaatgatatctttgaaatgtaaatgtttcatttcaccagtttctctatccatgactaataaacgactatgatcacgatcttttaaaggcgtttgagcaattaatgattctggtaagtcatagtcaaattcttcaatattcacgttattctctctcctcattcgactttgcaaaatgttcataagctaatggtgttgcttttctgccacgtggcgtacgttctaaaaagcctttctgaataagaaatggctcataaacgtcctcaattgtaatacgttcttcgccaattgttacggcaatcgtatctaaaccaacaggtccaccattatactgcttaataatacagttcatcattttatgatcaatgtaatctagtccgtgttgatcaacttgaagtaaacctaatgcgtgctttgttgtttcaatgtatatttgttcatcttcattcacttgctggaagtctcttacccgtttcaatagtcgatttgctactcttggagtccctctagaacgtttagcaagttcaatggcactttcttcatcaattcctgtgcctaaaacctcagctgttctaataatgatttcttttaaatctgattcattataatattctaatcttaagtgcacaccaaatcgatcccttagtggacctgttaagctaccagctcgcgttgttgcacctaccaaagtgaatggaggtaagtcgattcggatacttctagcctcatcgcctttaccaatgataatatctaaaaagaaatcttccattgcagggtataacacttcttcaacaacactactcagtctgtgtatttcatcaataaacaaaacatctccaggttgaagccctgataaaattgcagccaaatcaccaggtctttctaatgaaggccctgatactgtacgtatattaacttccatttcattggcaatgatattagataatgttgtcttacctaatccgggggggccaaaaagcaatacatgatctaatggttcatgacgaagtttagccgctttaataaatacttctaaattactttttattgaattttgaccaatatattgtcgtaatctcgtaggtctaagcgacaattcgaaatcagtttcttcactatgcattgattgatcaaccatacgctcattcatgacaacacttcccctattaatctatttaaaattaagatacaactaattgaagacctgccttaacagcttcatcaactgagtcatatttatttttatttaacgttttctcaacttttgcaagctctcgtttagaataacctaatgcttctaacgctaacattgcttcttgcacgaattgatcttgcaccgtcgatgtagcgtctacttgtaataatgaatcgctatcttcttcagtgattttcactttaccttttaaatctaagacaatctgtcttgccgttttcttaccaattcctgggaatttagttaaatacgtatcattttcattttcaatggcacgttttacttcattaggcgtacttgtcgctaaaatagctaaagctgatttcggaccaataccagtaactttaattaaactcaagaacatatctttctcttcttcactactaaatccatacaataattgtgcatcttcacgaacaattaaagatgtatgtattaaaacttcatgatctagatgcttttgaaaacgataagaatttggtgtttgaatttcataaccaacaccagcagtttcaacaactacgtgtgtaggatataaatgtgttaacttacctttgacatacgcgtacattataggcacatccttacatactcatactaattaattctacttttgatacataatctaaatttctcaaagcgccaataacatcttctactgaagtttctttagattgagcattcagtgataatgttattgttgctttttcttccattggaatactttgatgaatcgttaatacagatagttctaactttgatataacatctagtacacgtgccaacatacccacaatatcagttacatataaaattaatgtaaattctcgatggtcaagcattttatcgtctactggaaatatcgtttctctatatttataaaaagcacttctagatagatcaaactgtttaacggcatcataaatggacaatgtcggatcactttttaaggcatctttaatcttcaatgttttaaccacggattcaggcaagacatcttctctaattaaataaaactttttataatctttattgtccatcatgttacgctcctattcaacgaattcaaattctccgccaagaattctaacgatatcaccatttttacaaccacgttctctaagcgcatcatcaatacccatcgaacgcatttgacgagcaaatcgacgtactgctggatcactgttaaagtcagtcattttaaacattctttcaatagcattaccacttaccacataagcaccatcatcatctcttgaaattgtaaatttatcttgtgacggtgtatgtttatataatactcggttaatgccaaccgactcctcttcttcaactgtgaagtcaacatctttatattcttctaatttatctgctattgcatataataattgatcaatattatcacgcgttattgttgaaactggaataactggcacatcttcgccaatttcttctttaaataagattaaattatcttgtgattcaggtaaatccatcttgttagctactacgatttgaggtctatcttctaaacgttgctcgtacgcggctaattcttgattaatgactttataatcttcaataggttctctaccttcagaaccactcatatcaatcatgtgaacaataacttttgttctctctacatgtcttaaaaattgatgtcctaatccaacgccatcagatgcaccttcaattaaacctggtaaatctgccataacaaaacttcgttgatcaggtgttgaaacaacacctagatttggtttaatcgttgtaaaatgatatgccccaattttaggcttagcttttgaaacgatagataataaagtcgatttacccacactagggaagcctactaatcctacatcagctaataatttcaattctaaagatacatctaattcctcacctggttcacctttttcactgaagtcaggtgcagggtttctaggcgttgcaaaacgtgaattacctcgtccacctcgaccgcccttcgctactacagctctttgaccatcttcaacaagatctgctaacacttcgtctgtttcaacatttttaataattgtgccaggtggaacttttaatactaaatcttccgcatttttaccatgcatattactactttggccattttcacctttgcttgctttaaaatgacgttgatacctaaaatctaataacgttcttaaaccttcatccacttcaaatacgactgaagcacctttaccaccgtcaccgccagctggtccaccaaatggtacatatttttctcttctgtatgcggtaataccattaccaccatcaccggctttaagagatattttgacttgatcgacaaacatatatctcacctcttttacatataattttcattttcccaataattatagcatattagagccccttatattgtaaataattaggggctcttatgcagttgcttttaagtttactttactcaaattgctgaaatttccgagtaccaaatatgatacttttttgctttttatactgcaactgtattccttagccccttataatgtaaataattaggggctcttacgcagttgcttttaaattcactttactcaaattgctgatatttccgagtaccaaatatgatactttttgctttttatactgcaactgtattccttagtccccttatatattgtaaataattaggggctcttatgcagttgcttttaaattcactttactcaaattgctgatatttccgaataccaaatatgatacttttttgctttttaaactgcaactggattcctttgtccccttatatattgtaaaataattaggggctcttatgcaattgcttttagttcactttactcaaattactgatatttccaagtaccaaatatgatacttttttgctttttatactggaactgtattccttttagcccccttatatattgtaaataattaggggctcttatgcagttgcacatttagtataacgtctaaaatccccattttttaataacaaaatgaaaataataatgaaaaacgttttataaaaagtaaaaaacaccagaagattcacttctggtgttaactagacaaaattattcagctactgcatatacagaaacttgttttttgtcgcgacctttacgttcgaatttaacaacgccgtcgattttagcgaataatgtatcatcgccaccacgacctacattttcaccagggtaaattttagtaccacgttggcgatataaaattgaaccacctgttacgaattgaccgtcagcacgtttagcacctaagcgttttgattcagagtcacgtccgttttttgtagaacttaccccttttttagatgcgaagaattgtaagtttaattttaacatcggaatgcacctcacttataatttaatctaatattctcattatattcttcttcaatagtttgtaaagacacaagcattgtttgaagaattagttgcgcttcatcgttatttgtatcaacgcttcttatatgaaaatgaccaccattgtcgtcataattgatatctggtctctcagatgtcaatcctataatcgcattaacactaccaaacaatacagctgaagctccagcacaaacgatatcatgaccatattcaccatggtcagcatggccatccataataacgtctgttactttgccttcatcattaactgtaatatcaacagtaatcataataattacgcgttgattttatcgattgttaatttagtgtatggttgacgatggccttttttacgttttgaatttttacgacgtttgtatgtgaatacagtgatttttttaccgcgaccttgtttattaacagtagcagtaactgttgcaccttcaactgttggcgctccaactttaactgaatctccacctacaaataatactttatcaaatgtaaaagtatctccttcgtttacgtctaatttttcaacgaagatttcttgaccttcttctactttgatttgttttccacctgtttcaataatagcaaacatactttgcacctcctgtataataagtcacgccatacataggtgacatttcgttattgagtcaagcgtttgcactctacgttgtttcggtcgcaactcgagtcatttataaagataaactcttctcgtttcttccttcaacgccttgattgacaatcgctttctttcaataacttctgcaaatgagtcaagcgtttgcactctacgttgtttcggtcgcaactcgagtcatttataaagataaactcttctcgtttcttccttcaacgccttgattgacaatcgctttctttcaataacttccgtaaatgagtcatgcgtttgcactctgtgggacaatcgctttcttcattaaaaatgttcttgaacctatatttgagcggttgtatgtagctacttataactactcaactattgcatcttaccattgacggcgtttcatgtcaatgtcattgtttgtttttttaaggaactttataatcaacggataaagcatgatcaacagtacaaaattcataattaatgttggcaataatctaaagactacaaaatgaataatatcaaattgaatgaatcctaacataccgtatattaatgccacatagacttctaataataaggtgctagctaatataataatgaataacatcgaatgatctttgtaaaaaattttaaagaatcgatctataagtgctaaaaacaatatatagccaaataagtacactccataaatactaccaaagtatacatcagtcattacgcctaaaaaaatgctgagcaataatgatacgccaaagccgcgatacactaccatcattaaaatatacataaatgtaaggtgtggtacaaatacaagttcaaacttacctatgtgcattggaataagaagcccaattgcagtatctatataaaataataaaatacctatcaaaaaataatacagtgtacgcattatttatccctgctttcatcatcaggaattgttttaggatctctttttgcaacataaacatggctcaaatctgttaagtctgcaccagtcttaaccctaacttctttagctaagccgtattgatcattttgaaccttagtcacttcgcctatatataaattacttggtagttgatcagctaatccacttgtaacgactttatcaccttttgagatattatctctattattaatatcactaattacaagttctgagttcttttcatcataacgatcaattaagccaaatatatttttagaaccgtgttgtatatttacagataatttacccgcacgtgtattagttgagattaaatcaacttgtgaagaaaatttattaactttagtaactcttccaacaaaaccttgtgatgtcatcacagccatatttgaagttatacctgatttggatcccttatcaattacaattgtattcatccactgatccggatttcttgctaaaaccgtagtagaaataggatcaaattttgaaatatcttttaaatcaagctctttttttaatttttcattttccgcttctaattgttggttcttagattctaactggctaatcttatttttagcttctttagaatctccttttttaaaaaagtccccaatcgtaccagcaacaaaattaactggataactcacaactcgttgtccaaaagacacagaatcacctatatattgttcaggaggtgattgagattgtgaacgtatggacagcccaattaatgcaataaaaacgataattgcacataaaacaacaattaatttgttatttttaaaaaacttaagcacccagaacacctctattatgtcaaaatattatatatccttttctattttatattactcccattatgaaataaagcactaactacgaattactttgaaaatgaacaactccgtaaaatatttgtggcattttaaaaacaaaaaactactagcaaacattccagtcactagtagtttaaataatcgatttaaattttaaaattatctgtttgtatcgttcgaggattcactgttcgaattctgaagttgtctccaacgtgcgaataagttctgggccttttgttgttcattagcttgtttctgttttgattgttctgccatttgaactacaccaaccttttaaatttattctagtgacaggataactaaaatatatttcttatgcaataatttcctattgataagcattttcaggttttagttgtaaattttgccctaattcatttaagtcttgttgcatttcaaattcagtattgtaaacacgcattgactcatctccaaatttataaagaataaattcgtctcctctttgacctataatatattgatcattataagccatgcgattcattccagacacagccataaactcttgtttatctatcattttaaatacatttttaatttggcttaatggtacattctttattaaatcattttcttttaatgaatatttctcaccacttacataaacatgttgggcatcattagtgggttgcgtaacttgatttgtttgatcattatcgtgatttacaggattccaatcttgttcttttaaaaaaggtgcgtatttcaaggcgatataaacaattatcacaattgctattactgctataatgtttttaatcatactaaatatcaatctcatagttcgcctccagtgtcttcatctaattatatattttattatgtatattttcctcagtcttcagccttaatcatgatatatcttaggactgatgcacgttcatttaaaatagcttataattttgttatgatttaaaagcgtatgaggaggtttgtagcattgagtatactaacaattattttaatagcactattagtcatcctcctttttagagttggactttctattttgcgatttttaatttatgtcggacttgttttattatgtatttacttaggatatcaaggtttaatatggttgctcgatttttttcaaataaatagtgggtttttaccacactttcaatttaacaattaaatttattctgcataacaaaactcctaatgtactagtttagaattttttaactagttccacattaggagttttaatttgttttcaagcacggatactacttgatgaacagattactattacttacgcccaaatgcgttagataaaaatcgtatcagcgcatagctaccacttagtaaaaggccccaaacgattccagtaaaaattgagccaattgctacacttaataaaggaaaagcttgtttcgttacaatcacacctgctaacgccgttactaaaatacctaacgtagataaagctaatgttattaatagattgcgctttgttacaggttcatttttaatatttaactgcatggtataaaccattggcacgagaaccccgataataataaatagagtcactatttttcctccaatgaaagtacttcgtaggtattatacacaagatacgtcattaattctatcaacttcaatcattttcatcaaagtaacccgcttctacaagactcgtaaatctattatcaccgattataatatgatctaataaatctatccctaaaatcaaaccacactccttcaacctcattgttgttatgatatcttcttgtgagggcgttacatcaccggatggatgattatgaactgcgatgattgcattggcattttctctcaccgcaatactaaaaatttcgcgtggatgtacaattgaactatttaatgtacctttaaaaacacagctttctttaatcactacattttttgaatttaacaataaaatgacaaaatgttcttgtgttaaatctttcattgttggaatcatataatcagcaacatcacttggttgcgttatttttatacgattattttcagctcttctccccatcctttcccctaactcaaatgctgcttttaatgtaattgctttttgtaatccaatccctttaacttgtatcaaatcgttaattgaagattttttcaattcattcagattcgaagcagatttaagcagttcattactaatgtctatactcgagaatccttttcttccggtgttaattaatatagctaataattctatattcgaaagactttttgcaccatggcttaacaaacgttctcttggcatttctgaagttaccatttctttaattttcaaaaatatacgcctcctaaaaattgatggatatcattataaaaaagtgaattgataaaaaaggaaataaatataaatggaacaagggggaatagttttatcggcttaaatatcatggtaattaaagcaactaaaccagcaatgacaaatgtaaataaaatgacataaatagtgaattggagagggaaaaacaaagaaagtgcagatattagtaaaacgtcaccataaccaatatatgcccgaaataaaaagtagaatatatgcgtggtcatactaataatgataaaaactactggataaataatacttaacgaaagagaaacgatacaataaattataattaagcgacaatctaacattaaagacgtgatatcggtcatagtaaaaataagcagaaaaacatatgtagttataaatagcgtagcatttacgtatgtgaaatcatacttaataaagacgatagggattaaagcaaaggtttcccctaagaaatgtgttagggaaatacgcttacgacagtttcgacatcgcccttttaataataaaaaactaataatcggcattaattcataccatttgagtgatgaattacaataatcacatttcgatcttctatgtaaataatcaaatgacgtttcttctatagatataaattgatatagaaaactaaagatacaactgcaactataagataacaatactaccaaatgacaacctccttacgtaaagtatagttagttattaccgaaatgtaaatatacactattttccaagaattgcccctctttttcatttaaatttttcaatattgctaagcgtaattgatggatactttaacagcccatttctgctcgtcaaaattaataatggtaagaaattgaaccttataaacacatacgatttagagcataaaaaataaccatgaagctacctattgattaaatagattcttcacggctattttagttttataatgcttcaaagtctaattttgatttaacttcacttatgaagtacagactaccggtaattactaatgtatcaccttgataattttttataaattcaacgtagtcatctactaattgtatttcatcattttcaatactacctacaatttcttctttgcgtaacgctttcggaaaatcaaattcagttgcataaaacgtatgcgcaattaaacttaaatgtttgaccatctcgttaatcggtttttcgtttattgctgagaacaaaatatctactttttctttatcatggtactgtttaattgtatcaattagagcatctatactctctgaattatgtgcgccatccaaaatgattaaaggtttgtcatgcacctgctcaatacgtccagtccaacgaactgattcaataccgtctatcatcttattgaaatctaattcaattaatccttgttcatttaattcaataagagctgttatggctaatgcagcattttgtttctgatgttcacctaacatacttaaaatgattgtttctaattcataatctttataacggtaagtaaattcatcattttgcgatacaacaacaatttctctatctaattcaattggctttgcatgttgttcaattgcgcgttcacgaacatactttaatgcatcttcatttttaacagcatatatcactggaacattaggctttataatcgcgcctttatccctagcaatatctagataagtaccacctaaaatatctgtatggtctagaccgatactagttaagattgataaaatcggtgtaaagacatttgtcgaatcgttctttatacccaatccagcctcaacaatgacaaaatcaacaggatgtatttcaccaaaatataaaaacatcatcgctgtgattatttcgaattcagttgcaacacctaaatctgtttcacgttccatcatttcactaactggtttaatacgtgatactaattctacaatagcgtcatttgatattggcacaccatttagactaattcgttcattaaatgtttcaataaacggcgacgtaaatgtacctacttcataaccattttcaactaaagctgttctaaggtaagcaactgtagagcctttaccatttgtgccacctacatgaatacccttaatgttattttgaggattattaaattgtgctagcatccattccatacgtttaacacctggtttgatgccaaatttagttctttcgtgtatccaatacaagctctctaggtaattcattgttactaactcctatgcttttaattgttcaattcttgccttcacaccatcatatttttcttgataatcttgttttttacgtttttcttcatttataaccttttcaggtgctttacttacaaagttttcattagagagctttttatctactctatctaattcgctttgaagtttagctaattctttttccaaacggctgatttccttatccatatcaattagcccttctaatggtaataccactttacctgcaattacaactgatgtcattgctttctcaggaatttccacgtcagtgctaatatttaacgtactaggattacagaatttgattaaataatctttgttttgtgataaagttgtttcaatttctttatctttagcttgaattaaaataggtatttctttagacaatggcgtatttacttctacacgtgattgtcttacagatttaatgatttcaacaagttgttgcattgtttgtttactttcttcaaaaatcaatgattcacgcacttctggccatgaagctttaacaattgtgtcaccttcatgtggtaaactttgccatattttctctgttacaaatggcatgaatggatgtagcattctcataatattgtctaaagtataactcaatactgaacgtgtaatttgtttttgttcttcgtcattaccattcattggaattttactcatttcaatgtaccaatcacagaaatcatcccaaatgaaattatataatgcacgtccaacttcgccgaattcatatttgtcacttagatcagtaactgttgcaatcgtttcatttaaacgtgttagaatccatttatctgctaatgataagttaccacttaaatcgatatcttcaactttaaagtcttcaccgatattcattaaactgaaacgtgccccattccagattttattgataaagttccacactgactcaactttttcagttgagtatcttaaatcatgtcctggagatgaacccgttgctaagaagtaacgcaagctatcagcaccgtattcgtcaataacatccattggatccacaccattacctaatgatttactcatcttacgcccgtcttcagcacgaactaagccgtgtaataacacatcattaaatggacgacgatctgtaaattctaagccttggaatatcatacgtgctacccagaaaaagataatatcgtaacctgtaactaaggcatttgttgggtagtatcgtttaaagtcttcgctttctaaatcaggccaacctaacgtagagaaaggccataaagcacttgagaaccacgtatctaatacatcttcatcttgttgccaattttcaatatcagttggcgcttcttctccaacatatatttcgcctgtttctttatgataccaagccggaatttgatgaccccaccataattgtcttgaaatcgtccaatctctaatattttccatccattggttaaatgtatgttcgaaacgttgcggataaaaatcaatacgatcatctgttttttggttatctaatgaacgtttcgctaagtcttccatgcgcacaaaccattgtgttgataaatatggttcaacaacagcgccagatcgttctgaatgacctacagaatgaacatgatcttcaatcttgataactaaatcttgttcttttaaatcttcaactagctgtttacgacaatcaaaacggtccataccttcgtatttgccagctttgtcgttcattttaccattttcatccataacgataatattttctaattgatgtctttgaccaatttcaaaatcattagggtcatgtgctggtgtcactttcatagcaccagaaccgaagtctatatcaacatactcatctgctaaaataggcagttcgcgtcctacgattggtaatataacagttttaccgattacatctttgtatcgttcgtcattagggttaacaacaatcgctgtatcacctaacatcgtttctggtcttgttgttgcaatttcaataaaaccttcaccatcagcgtaaggatatttaaaatgataaaacgcaccttgaacatcttcatgtattacttcaatatcagataaagctgtacgtgctttaggatcccaatttataatacgttcgccacgataaataattcctttattgtataaatcaacaaaaacttttttaactgctttacttaaaccttcatctaaagtaaaacgttctctactataatctaaacctagacctaatttagcccattgcgcacgaataaatgacgcatactcttctttccaatcccatgcctgttctaaaaacttttcacgaccaagatcatatctagttattccttgttcatttaatttagcttctacctttgcctgtgtcgcaataccagcatgatccatacctggtaagtataacgtatcgtatccttgcatacgtttcatacgtgtaatgatatcttgtaaagttgtatcccatgcatgtcctaaatgtaatttaccagttacatttggtggcgggataacaattgtatatgtttcttttgatttatcttctgacggtttaaaataaccattctttacccattcttcataacgtcccgcttcaacttcacgaggatcatattttggtttcatttccatttgctatacctcctaaaaaaataaaaaatatccatcctatatacaaataggacggatattccgtggtaccacctatattcaagaaggatgattaatatcaaattcactcttttaacataattggaataatcataccaatactatcatcgtgaaatttgaaatgcttcatctcttcaagcactctagattatgattaacgctcaaacacgtcttagcctactattaatcacgttcagctaagatactctgtgggctaccttcagtaaaaatcatttacatactcacaccaaatcatatgctctctttaaaataatttgaacttactcttcccaaatcctatattaaactcttaacttatagtataatgattgacaaaataagtcaatgtataggtgggaataaaatgaatgaatgcgcatttggaactaaagatccagtctatttagactatcatgattatgtatggggacaaccgctctatgatagcaaggcattgtttaaacttttagcattagaatcacaacatgctgggctatcttggttaactattttaaaaaagaaagaagcctatgaagaagcattttatgatttcgaaccagaaaaggtagcacaaatgaccgctcatgatatcgaccgcttaatgacttttccaaatatcgttcatcatcgtaaaaaattagaagcaattgttaatcaagctcaaggatatttaaaaattgaacaagcatatggtagttttagtaaatttttatggtcttatgtaaatggtaagcctaaagatttgcagtatgaacatgcttctgatcgtatcacagttgatgatactgcaacacaactatctaaagatttaaaacaatacgggtttaaatttttaggtccagtaacagtattttcgtttttagaagcagctggtttatatgatgcacatttaaaagattgtccatcaaagcctaaacacaattaatttgctatagcatcataaagtaaacgagacatcatctatttttaactaatagactgtctcgttttttaatgtagaaatttattcaaaccacaagttaatgtaccatgttaatgcactgctaatattaaatatcttaatctaaaaatagatgtacaacctttgcttaaaccttaataatgaattctatcctaagcataatttaacttaaatggatgatagtttctaatcttcacgcttattcgaacgaaattttaaaaagcaattaattcctggtgcaataataaataggatgaaaaagattcggaaaatatgataactcgtaatcatagcaacatcggcaccagtagctaatgcaactaaaactatctgattaacccctcctggtgctgcaccaagaaacaattcatttataggattattatcaaagaaatgtatgacataaaccatgattagcgcaccaattatcaacataatattttgaattgtaattgcgattgctagtctaccttttaaatctgacaataaatgcgctatttgaactccaattctaatcatatatattagttgtgccatgttcaacaaccaatgatctagtgtaaatgttaaacctgtagaaaaattccaaacaattaatacaatgagtggtgctaataattgaaatgttggaaactttattttagacataattagataaactataaagatagctatcactaaaataactatttgccctatgtttaatacttgtgataaaggcaagacttttgttaacttaccattcgcatgcatgttaccatcatgaaaaaaatatgaaatgaacggtactaaaacaacaacaaatataattcgtgatgtttgcgttaagctaactactaacaaattagcacgtttgtcttgttcagccatgaccagcatttgtgttagcgctcctggtataacacttaaaatagctgtttctgtattaatacgtgcaatttttttgaaaataaatgccattactaatgcaattactaatatcgaaatagatacaacaataatcgaaagccaattgtctttaatatccataacgacatttttcgtaaacgttgatccgatttgcacccctaatagtacaatccctaattcactaagtaagaatggccatttaatatcaagtttgaaaactttcacacaaatgattgatgcgataataggaccaaacataaatgggagtaatacgtgcgatagatacaatataatactaataaaaaatgataaaacgaacacaatgaaattatttctatatatcattgtcatgttttccacttctttcaataaaaaataaaatgactaaattgctgcttgagcttcacgtttgttaagataacaatatccgctagcagttttgactacaaagcatatatggactttcactatcaagtcgctgcccatgtctgatatacatttaaaaagagcctgaacaaagttcaggctctcaatttgtccgtatatttattttacaatacgacttaaagccgtatcaaatgcttgaatcgttttttcaatatcttcttttgtgtgtgccgtagataagaatgtaccttcaaattgagatggtggtaaaaatacaccttcttttgccatttcacgatacatttctgcaaataatttcaaatcacttttattcgcttgttcaaaattagttacaggtccttcatttaaaaaataaccaatcattgaacctgctctatttacagttattggtacattgtgtttagcaaatacacgctttaaaccgtcttcaagtatatcgcctaacatattaaaatactcatatgtctctggcgttaattgacttaacgtttcataaccacttgtcattgcaagaggatttcctgataacgtaccagcttgataaatatttcctaatggtgctatatgatccatgatttcttttttaccaccaaaagcacctacaggtagtcctccaccgataacttttcctaagcaagttaaatctggtatcacaccaaagtgaccttgtgcacaatgataaccgactctgaaaccagtcattacttcatcgaaaattagcaatgcgccgtattcagtcgtaatatctcttaatccctgtaaaaaaccttcaatcggcggtacgacacccatattaccagcaacaggttctacgattacaccagcaatatcgtctccaaatttttcgaaagcgattttaagtgcatctaaatcattgtatggaactgtaattgtatttttagcaataccttcaggcacaccaggagaatccggcaatcctaatgttgccaccccagacccagctttgattaataacgaatcactatgaccatgatagcaaccttcaaatttcacaattttatttctgccagtataaccacgtgctaatcttaaagtatccaatgtagcttctgtaccagatgacaccatacgcactttttctattgaaggtactcggtcaattacgagctgcgccaatttattttcaagtaatgttgatgcaccaaaacttgtacctttatcaattgcttcatgtaaatgactaataacttgagggtctctatgtcctaaaataagcggcccccaacttagtacatagtcgatatactcgttaccatcgatatcataaatttttgagcctttaccgtgatccataaaaattgctggtgtatctactgatttaaatgcgcgtactggactatttacaccaccaggcattaaggtttcagcaaccttcattgcttcttctgacttcgtatatctcataaagtaaattcctcctacagtttatggaaaatcatacatataaaaccttatttatctaaatagcgacaaatgtcctttgcaaaatacgtaataatcatatcagcacctgcacgtttcattgaaaccatttgttccataacgacacgttcttcatctatccaaccattttgtgccgctgctttagtcatactatattctccactcacattatatgcaacaactggaacattcgtatgatttttaacgtctcgaactatgtctaaataacttagagcaggtttaacaatcatcatgtcgcacccttctttaagatcactttctaattcacgaagtgcttccaaacggttagcagggtccatctgatacgtttttctatcaccaaatgatggcgctgaatctgctgcatctctaaaaggtccaaagaaactagatgcatacttgacaccataactcattataggaatattgtaatagccggcttcatcaagtccacgacgaatttcagcaacaaaaccatccatcatattacttggtgcaataatatcagctccagcttccacttgagaaattgctgttttaacaagtagtggcaatgatttatcattgtcaacgtcatgtgtatggtcatcaatcacaccacaatgaccatgatcagtatattcacacaaacaagtgtctgcaacaattaataagtcatcatacatttttttagcaatacgtgttgcctgttgaataacaccatcgtgaatgtatgcaccagtacctatattatcttttgagtttggaacaccgaaaaacataatggcacgtatgcctaagtcataagcttcttttaactcactttcaagtaaattcaaactgatttggtatacacctggcaatgacttaatttcttttttcacatcgtctttttcaactacaaaaattggatatattaaatcttcttttcttacatgattctctctaaccatatctctcattgtcgctgatgatctcaatcttctatgtctatcaaatttcatttttagcccctactttctaaaatcttttcaattagtgattcaagtgtttgaatttctgcaattgttactggttgttgatatgatttaatggtccgtgctgtttgttctccaatagcaaaatacgacttgaattttggtacaaatccttcattaaaataataacgtactgccgacgaacttgaaaatgttaatgcatcgatttgttgatgttctatcatttctttaacatcttgtatattttgtttgttaggcactgaagtatataaatctattttaacaacttcattatctttagataacgctgctgataacaatggtctcgccaattcacttgaaggcaaaagtattttttggttagtttgattaaatgattttaaaaatccttcttgagaaaagtcgtttggcataaaatcaacttgaatgccaagtgattcacaatattgcgctgtcttacttcctatcacagcaatgttatcaacattaattccttttagatatttataaaagaatttcacagcatttttagatgaaaaaataagccagtcatagcgttgatttaacaaatgaatatcaaaatttagtggctttatatcaataaagggtttgtgaataattgatactaaatcactttgcatgtcatttgtttgtgtcataactacaactggcttcatatttaaacgtcactccattatttaatgttgttcatttaagcgttttataatttcataagcaccttgctcttttaatttgttactcacttttttgcctaactcaaccggatctgttccgttcattgtatattcaaatcgttctttaccatctggggtcataattaaacctgtaaattcgatttctttttgatctgagattgtagcatatcctgcgattggcacctgacaactaccatccatttctgctaaaaacgttcgttcagcagtcacacattttgcaacctcatcattatgtactttgcttaataatgttaatagttcttcatcgtcactacgacattctatccctaaagcaccttgtccgattgcaggtaacaatgtatctctatcaagataagatgttacgatatcatctgaccagcccattcttcttaaaccagctgcagctaaaataatcgcatcataatcttcagtttgtaacttttctaatcgtgtatctatattacctctaatccatttaatctctaaattaggatacttagataatatttgtgcaccacgacgtaatgaactagtaccaataatactgccttctggcaattgggatagtggtgtatgtgttttagaaatatacgcatcaaaaggtaattctctatcagggatacaacctaatgttaaaccttccggaattacacttggtacgtctttaagcgagtgtattgccatatcgatatttttttcaaaaagttcatgttgtatttctttaacaaataagcctttgcctccgactttagacagttgtttatctactatacgatcgcctttcgtgacaatttctttaatttcaatttctagatttggctcgacagcttttaatttatcaataaattgctggctttgtgttaaagctaatttacttcttctggagccaacgactaatttacgcatgttcaattcctcctaggaacggattgctctagattattttctcaattcacaaaatgtgttgcaaaaaataaattaatcatatttaagcaaaataaaataatgttatagtatattaaataccttgaattcaaccatttgttgattctaagtaaaatataacttccatataatactgtaataattgaagagagtattaccttcgggtcaatgaatatacgttcaccaactgaaattacaccccactgtgtacctaaaataatactaaatatgagaattatccacccacttaacgttgagtaaaacacaattgattcaagtgtagcaacgctacctattctaaagtatttttgatcaaaacgcttttccttcaaattacggtattgcatgatatacagtaatgcattgacaaaagctaaggcaaagaagacataacttaacacagctagaccaatatggactaacagtaactcgtctacaacagcaattttctgaaccttattagtataatgtgtcggttgaaatgtattcatccctaaaagtgttaaccctattaaattcaagaaaaacacagaaaaattcaaaactttgataaggttaagaattaaagagattgaaataatcagccaacttaaagtatagaatacatctgaaatagaccctaatggaatatgtctagtttgtataataaaaatagataaagagattgtttgtaaaacccaaacaatccccaataagtatatgcctaaacttctaatcttatgacttttttggacaaaatcataaaaatagcaaatgatactgattaagtatattaataatataatttcattgaatcgaataaacaggttttcttgcatattatcaccatattaatatgcttattcaaaactaaagatacgtcgcgctgaaatctccttgaccttgctttctttttgttgcttcgcttgctcatgaggacattcagcttcgatatcaaatatattttgaaatagctctaatttttcattacttttcttatcactacttaattctttggcctgtttaataggatctttcaacatttgattgatgatactttttgtatgtttagatataattttacgttctctttcgcttaaacctggcaatttacgatcaatactgtccatcgtttctgcttgaattgccatagctttttcacgtaaagctctaatcactggaacaacacccaacatactaatccactcattgtgtgcatgtatttctgcaggaatttgttccgaaattgttgcagccgctaattgtcgctcacgtaagtttgcatcaactaaaccttttaagtcatcaacatcataattaaagatgtttgtgatggcactaataccaggttcaatatctcgaggaactgcaatatcaatcaatactagtgaatcttgctttctattttctgcaattctttctatcatttcatttgtaatgatataagtttgtgcactcgttgaactaatcacaatatctgcactttcaagtaaatttggtaatgatgatagttcatcatatttcacttgatgctttgctgctaatttcatagcattttcaattgttctatttactactgtaatatcagtaattccagaaccaagaagatttaatagtgataattcactcatttcccctgcaccaataatgatagcttgcttacttttcaatttgccaaatacttttttcgccaactcgaccgcagcataagacacacttacagcattatcagctatatctgtttcattatgtgctctttttgcaaaagtaattgcctgtttaaatagatgattaaaaattgttcctgtcgtacctgtgctttgcgctaagaaaaatgcatctcttatttgacctaaaatttgagtttctccaagtacgattgaatctaaaccagaagtgacacgcaataaatgttctactgcttcgtcccccacttttacttctgacattgctttaatatcatctacttcaaatccaaatgcacgagctagaaatcgttgaatatagtaacgacctgtgtgaatttgatcaacaacagcatatacttcagttcgattacatgttgataatatgacattttctaaaatagatttagtttcatataaatcttcatgggcaattcgtaaggcatcatctctaaaagcaacttgctctcttagtgcaacatcagctgtgcgatgatttatactaattgcaataaaatgcatttgaaacgcccccatatatactaacaatacaaatattataacataatttaaaatccaattaagtacgatgcttaaataaattataatctttctaatttacttttgagtttttgacaaaatgatgaacgttgaaaaatgttatcaattgtgtactaattaaaagtttcgtgcttacattatttttaaaatttttgtataagttttgtcgtacaaaaactatgaaatatacggttcaattaaattccatatttgttgttgtttattattttgaattgatgaataacttacaattgtatcgtctgggtccatatctaattgtgtcttaatatttttaatatgcttttgaactttaccttttggaattttgtcttctttagtgcatataactaaagtaggaatatcaaaatgtttcaaataattgtacattaagatatcatcttgtgttggatcatgtcttaaatcaactaattgaataactaattgcaaattctctctcttagttatatattcctcaatcattttcccgaatttttcacgttgtgttttacttactttagcatatccatatcctggaacatccacaaaaataagttgttcatctatattataaaaatttaacgtttgcgttttgccgggttgctgcgatgtacgtgccatattttttctaccaatcatactattgataaatgtagacttacctacattagatcgaccgctcagtgcaacttcagacaattctgtttctggatattgttcttcctttactgcactaatgattaattctatattattaggattaactttcattttgtatcctcacttttttatattctctttcaactctaccattatataatatttgaacctttcggtatacattataaaaaagctccgatcaaagttaaactatttgagcgtcaactttgattggagcttttcacttttataacacatcaatgattaagctgatgttttactattattaattaaattaccttctgcgtcgtatagttctggttcagtttcttcattaattgtttgtgctgtaataactaccttcgttacattttcgttagaaggcacatcaaacataatatcgattaacgattcttctatgattgaacgtaaaccacgcgcacctgtttttctttcaattgctttttcactaattgctgataaagcttcttcagtgaactctaaatccacatcatctaattccagcattttagtatattgtttcacaagtgcatttttaggttgcgttaagatgtttttcaacgcagttacatctaatgtttctaaattagctacaattggcacacgtccgataaattcaggaatcaaaccataggcttgcaaatcttctgggcgaatttgtgctaataatgcttgttcgtcatatttatcagcttcattgcttgagaaaccaataactttttcaccaagacggcgcttaatcacttcttcaataccatcaaaggcaccaccaagaataaataagatatttgttgtatcaatttgaatcatttcttggttaggatgtttgcgtccaccttgtggcggaacacttgcagttgtaccttctaagattttaagcaatgcttgttgaacaccttcacctgaaacgtcacgtgttatagatgtgttttcagatttacgtgcaattttatcaatttcatctacataaataatacctttttcggctttatcaatgtcaaagtcagctgcttgaattaatctcaacaagatattttcaacatcatcgcctacataaccagcttcagttaaacttgtcgcatctgcaattgcaaatggtacattcaacgtcttggctaatgtttgggctaataatgttttaccactacctgttggcccaattaaggcaatgttacttttttgtaattcaacatcatcttcttttggtcctaattgttgaatacgcttatagtggttataaacagccacagctaaagattttttagctttttcttgaccaataacatattcgtttaaatgatccataatttctttaggagtaggtaattctgtaatcgcttcagaagtgttttgagctaattcttcttcaacgatttctgagcataattcaatacactcattacaaatatatacaccacttcctgctacaagtttttttacttgatcttggtcttttccgcagaaagagcatttcaaattttcttcatcttcattgaatttaaacattctttttacacccctattcgttaaagactatactagattggatattacaatgcaacatattaacatacaaactttttgcttaaagaatagtagcagatacataagctatgcatctgctactcatttttgtaatttaatatttaatgaagattaatcttctttagttccttcaacgaactttgcgttatctcttaataaatcgataactttttggatacgaacatcatttttaatgatatcagtattacctaaagtatttttgatatcttcaactgagatattaaattgtttactcattttttctaattctttatcgatatcttcatcagtagcttcgattttttcagcttcagcgatcgcagttaaagttaagttagttttaacacgttgttctgcatcgtctttcatttgctctcttaattgagattcatcttgacctgagatttggaagtacgtttgtaaatctaaaccttgttgttgaattctttgtgcaaattcagacaccatacgatctaattcagtattaaccattgcttcaggaatatcgattgttgtattatcagtagctttagtaatcgcttcttctttttcaacattttctgcatctgtagctttttgttcaactaaacgtttacgtaagttttctttgtactcgtctactgtatttgcttctgcatctaattcattagcaatttcatctgttaattctggaacttccttgaatttaatttcgttaacttttgttttgaaagttgcttctttaccagctaattcttcagcatggtattcttctgggaatgttacgacaacatctttttcttcgtcaactttcataccttctaattgctcttcgaaaccaggaatgaatgaacctgaaccgatttctaaatcgtaaccttcagcttgtccaccttcgaattcttctccgtcaactgaaccactaaagtcgatgttaactgtgtcgccattttcaacaacaccatcttctttaactaccatttcagctaaatgtcctaagctgtggtcaattgcttcttgtaactcatcatcagataattcagtttcttgtttttcaatttcaagacctttatagtctcctaatttaacttctggctcaactgtaactgttgcttcaaaaatgaaatctttacctttttcaatttgagtaacacttacttctggttgtgcaactggtttaatatcagtttcgtcaattgcttcaccataagcatctggtaataaaatgtcgatagcatcttgatataatgcttctacaccaaagcgttgttcgaaaattggacgtggtactttacctttacggaatccaggtacgttaatttgtttaaccacttttttaaatgcttgatctaacgctttgtttactttttctgcaggaacagtaacagttaataaaccttcgttaccttcctttttttcccaagttgctgtcatgtatatatacctccatgattaactaatttattttttcaacttccctattatatcataggtctattccctatacaaacattgaaatcacaacgtttatatatttgtaaatcaacttttttcgtcaaaactatattaaaatgctgagtattattttgcaacaatttaactattattattcaaatctaattgctgaataaaattaaatgcatcgatactttgtaattcacatttaagtcctaacatatttttgaaataacattcgtatgcattaatccatttattcgtttcaaacaaagtttcaatatcaattggataaatcatgatagagtgattattcataatatggtgtgcttcttcagcgatatgtaaagcaccatcatttaatgtttccataacgttaggtataactttttctttcagtgttgtatgttctagcccttttaaattaactggtacaaaagttacatccataccatacttttcaattgtcagttcttgtgtacaatttgcgaatcttaaatactcaatcattaaactaattaggttataactgtacgtattagattttaatatatataataccgtttcttgaaattgaaaatgaccattgtctattaacttcaaaatcaagtgcgtctgttccctcattgataacgtatcaaaatcagttaatgactgagtcaatcgtttttcatcttcaattaattttgacttagcaaattccttaagaggatgtaatgccattcttgttttgtgatctttgacttcatcaataatttgatgaattacttctaccgcttcaaaatattgtcccaaaccaatcaaacttttcacgtaataaatcatcaatgcatcatattgttgtatgccagttttcaataagacaattgtttcttctcttaattcaagaaatgaccccgtctcatataacatacggcatttcatcattgctatttcttcagtgagttcaaattgacgttcatattgtacaatatattcatacatcaggtcatagttttggtcttgttcagcacgttttatatctttatataactttttcgaagagttaggaaactgaataatatctgacatatatgtcacctcgtttgattataaatcttgaaggattaatgcgctccacgtttcgaaatcatcatatgactctatgttgcctttttcaacccattttattcgtaaagtatctgtttctttagcttctacatcattcgtacttacagtgattttaaatacaacaccaatatgtactttgcccacttcattattatcgtcattaataaaaccgatatattccatattttgtgaatcttgctcacttaaacctacttcttcttctaattctctctgtgcattaactctcaatacttcgttaatagattctgctcctggaacatcattcatatgaccgcctacacctattgaagattgtccatgcaatcgagattctccaccgccagataatcgttcatacactaatatctcgccatgctcattttcaagtaaacaataagaaatgagttgtttatatgatggatcctcttccatatcgccgcgtcgcttaacttcatattgacttagcgcatcaaaaatattttgaccttctggtttattcttatttaaaaacccattgaaagtattcttttcattattaaaaataatttctctaggtactacaatgatttgttcatcaaatttagacatcgtataaaactcctcactttaatgtttgttctcttaaatgcattttagcaaatatgtcatgttttagcgattaaatgtggcattttgctatttaaaaaataaaaaagagatgacaatgccatctcttttttataagtgttattattttaaagcatctttagctttagttactaattgagcaaatgctttttcgtcagaaattgcaatttctgataacattttacggttaatgtcgataccagcttttttcaaaccgttcattaaacgtgagtagctcatttcatgttgacgagctgctgcgttgatacgtgtaatccataatttacggaagtcacgtttacgttgacgacggtcacggaaagcgtattgacctgatttcattacttgttgcttagctactttgtataatgtatgttttgaaccgaagtaacctttagctaatttaatcgtttttttacgacgcgctcttgttactgttccacctttaactcgtggcataaaaaattcctccttaggtaattcctaccgatttctgtatttgttcttattttttgtatgctaataattgttttacacgtttcatgtcgctcttagacactaatctagctttacgtaattgacgtttttgtttagtgctcttgtttgcgaataagtgagatgtgaaagctcttgaacgttttaattgacctgaagcagttcttttaacacgtttagctgctccgcggtgagttttcatttttggcataatataagtcctcctgtaatagctttaattatttttcagctgttggcgctaacataataaacatttgacgcccgtccattttaggtttttgttcaactgttgctatatctttgcattcatctgcatatttttctagcacacgttgaccaatttccttatgcgtaatggcacgccctctgaaacgaatagatactttacatttatcgcctttagttaagaatttacgtccgtttttcaacttagtttggaaatcatgttcctcaattgttggacttaaacgaatttctttaacattgataattttttgtttctttttcatttctttttcttttttctgttgttcgaatttgaatttaccgtaatccataattcttgcaactggtggtttcgcattcggtgcaacgaccactaagtctaaatctacacgttcagccatttctaaagcttcacgctttgatttaacaccaatttgttcaccatcttgaccgattaaacgtaattcttttgcacgaattttgtcattgatttgagtttgatcttttgctatggttgacacctccaaaatttttacgaaatttgcaccaagcaaaaaggaagagcaggtataaaatacccgctcttccttatacacagttatgtgtaatgtgattaacctgccaactgctttatgcgtcgctacaggtgagaagcgggtgcttctacttggttcgtttcgtattcaacgttgttaatcatatcaacaattcacatttaagtcaacactataactgtaattatttttattttaaccttttatttcatccattgatacgtcttgacgtaaatctacttgttctaatggaatttttttcgttttatatcgaagcttatgataaataaagaatgctaaaaatactggaattcccatatacgtaattaggaagcggctaaaattaaaatctcctgttttaataaagtccacatcttgaccgatgattacaacaatacataagatagctgcaaaaataggtccgaacggaaacaatttagctgtatatttcaatttagatttatcataattttgtttatcaaatgctcttctaaatcgataatgactcactgcgatacctacccaggcaataaagccagttaacccacttgcagcaacgatatattgataagcaccttctgtaacactttgtaccacaaatatgatgactacaataattgcagttactaataaagacatatatggcacaccatttttatttgttttcccaaatgtttcaaacgccaatttatctttactcattgaataaagcatacgtgttgaggcatacattccagagtttcctgctgataaaactgatgttaagataacagcattcataaatgaggctgcaaaagcaaatcctgcatttttgaaaactagcgtaaacggagaggttgcaacgtcattaccgcctcccattaatgcactactatcataaggaattaacataccgataacaaaaatggctaaaatgtaaaataataaaattctccagaatacttgtttaatcgctttcggcacagcacgttcaggattttctgattcaccagccgtaataccaattaactcagtaccttggaatgagaaaccagcgattaagaatacacctagaattgataacaaacttcctcctaggttgccacctaaaataggtccttcacctttattaaatatttcaaatcctacaaaatgtccacccataattcctacaatcgttaataaaccaatagcaataaaaacgataactgtaacaacctttattaatgcaagccaatattcactttcaccatagacacgaaccgataaagaattcagactaaaaattataactaagaacaatgcactccacgcccaagcgggtatgccttgcaatggtgtccaatattgaatgacttgtgctgcaatcgtaatatctgctgctacagttactacccagttaaaccaatagttccaaccaagcgcaaaccctaaagatggatcaacaaatcttgtagcatatgtactaaatgaacctgatactggcaaataagtagccatttcgccaagtgacgtcattaagaaaaataccattattccgataattgcgtatcctattaatgctcccaaagcacctgcatcatgaattgctccaccagaagttacaaataaacctgtaccaatacaacccccaatcgcaatcatagaaatatgacgatctttaagtccccttttgacaacattgttactttcattttgaacttttgacatataagctccctttccatgttttagaggccaagtaataaataacctttatttactttcataccctttttttacagaacatagtgatattaaaagtaaaaaagtggctacatacctttaagatatgcaaccactttggcaattatctatataaggtagcacatcacattctgtgacagtacagttcctattcgaaaactgtcccaatagatatagtttatggtttatatctatttcggcatctttacctttcacttgttcaacttatgtaccataaatacttctgacaagttactaattaaacatgcaacctctaactcaatttaatattttaactaacttgtaatatacaggattcatcacgcataatcaaccctgtaaaacttgatacgcaataaaagtttcaaagcattttattgcgacaactgtctatctatgttttttcaaacgaatttcatcaactagattccagataaattcatctttttcaactgtttcttggtcttgcgatccatattgacgcacattcacttgattattttcaacttccttatccccaactacgatttgataaggtattttttgcatttgagcttctctaattttataacccattttttcattacgctcatcaatacttacacgaacaccttgagatttcaattcatcttgtaattgtcgcgcataatcataatgtaaatcaacgttaactggaatgatttgaacttgttttggcgctaaccaagttgggaatgcacctttagtttcttcagttaaaaatgctacaaatcgttccattgttgatacaacaccacgatgaataacaactggacgatgatgttcaccatcttgaccaatataagttagatcaaaacgttctggtaataagaaatcaagttgtgctgttgataatgtctcttctttacccatcgctgttttaacttgaacatctagtttcggaccatagaatgccgcttcaccaatcgcttcttcgtacgataagccaagctcatccgctgcctctttaagcatattttcagctttattccacatgtcatcatcatcaaagtacttttctttatcttcagggtctctataacttaatctaaagctataatcctcgaaaccaaagtctttatacacatcaataatcatgtttacaacgcgtttgaattcttctttaatttgatcaggtcgaacaaagatatgtgaatcatttaaagtcataccacgaacacgttgtaatcctgatacagcaccacttgcttcatatctatgcatagttcctagctcagcgatacggataggtaattcacgatatgagtgtggtttattcgcataaatcatcatatgatgtggacagttcattggacgtaataccatagattcagtttcatctaactgcattggtgggaacatatcttcttgatagtgatcccagtgaccagatgttttgtataaatcaacattagcaagtactggtgtataaacgtggtcataccccatgctaacttctttatcaacaatgtaacgttcaatttcacgtctgattgttgcaccgttaggtaaccataatggcaaaccagcaccaactaattggctatttgtgaataattctaactctttaccaattttacgatgatcacgttctttacgctcttctaacatttgtaaatgtgcttttaattcttttttatcaaagaaagcagtaccgtatatacgttgtaacattttgttgttactatctccacgccagtatgcacctgctgtagataatagtttaaactctttaattttagctgttgatggaacgtgaactccacgacataaatcagtaaaatcaccttgactgtataatgttacattttcatcttcaggaatcgcgtcgattaattctaatttgtattcatcattgctgaataactctttcgcttcatctcgtgaaaccacttttcgttcgattttcatattttcgttaacgatttgtttcattgttttttcaatttgttcaaagtcatcagatgagatgttttggtctatgtcgaagtcatagtagaagccaccttctattacaggaccaacaccaaatttaacattaccatataatcttttaatcgcatgtgccattaaatgtgcagtagaatgacgtaatacctctaacgcttcttcactacctggtgtcacaatttcaattgatccatcagtttcaagcggtttagttaaatctacaagttgcccgttaaatttgccggcaactgcttttttacgtaatccaggactaattgattgtgctatatcttcagtagtagtacctttatcaaacgcctttttattaccatctggaaattgaatattaatttgttccatgttaaaccctcctatttgctttataaatacttttatctgacctcgttaaaatattgaacaacaatcatcgttttaacattaaacctattaacaataaacagggactttatgacaccaacgaacatttttgtctaaaaaaacaaaaaatcccgcccctatacaagggacgagatcgtcgtggtaccaccctagttatttaatacaaattatgtattaaatatctctgcttaagataacggtcttgagccgggtattcattacaaataccataaatgaagtagtaatcatctaatttattaaccatattctcatcaaacaatggctttctgtgtaatattgattagatcatcttgtcttcaatcatttaaacgatttagatttgtattcattatacaccaatcattttaaaattcaattgtttctgaaattttctcctgataaaaagtatggtgttgacaaagatttgacacgttcaataatacgtgctgctttagtcttctcttcaccatcacgagtcatcgctaaatgatgttccaattcactatagtcaaaattagaactaaagaatgttggtaattcatgaaccattcgataatgtaacaaaggtccaattacctcatctctcacccatggagtcacttcttcagccccaatatcatcaagcattaaaatgtttgcttctcttacgcgatgtaatttcttttcaaaagaaccatctttaaagccaccttttaatgttctaataaattccggtaaataaataattgtcgaacgtaccttcttagatttgagctgattcgcaattgcacctagaataaaagatttacctgtcccaaatggaccataaaggtaaaggcctttcacttgttccccattagttattgctgtacatatatcatctgctgccatagctacatcaagacggtctcgatgattcatataaatatctttcaatttggcatttaaagtatctcgttgcatatgatgagatgtaattagctcagcttcaaagcgttcttcgtcgtacttgattttacatgggcattgtaaatagcgtattttaattcggttattatcaacatataactcaggcacatgcccctttacgaaatttggacaatcagcaaatttatgaccgtcataatgtttttgttgatctttatactcttgtaacacatttaagtcttcatcaatcatagcattcgttaattcagctcgatgcgcttccaaaaatcgcttaacatctgggtcattgattacttctttttttatcttttctattcttttttcaaagtcctgcgacgtgttaattatacttttaaattgcttcattattgactgtcctcctcccattttttagataatttatctagaaatgcttgtcgatcttgctctaattgttgatcatctacgctattatctttagccgaatcttcttcactaggtttatctctattttctaaccatttaggtgttttttcttttgaaatgcgattacgctgcccatagtatgaaccacgcttttggtaatttccgctagaaccctcatttttaggttgattaacttttttagcataattatatgcttctttagctgtcttaataccttttttcttccaatttgatgctatttccaaaatatacgctttaggaagtttcatatcttcttttaacatgacaaattgcaacaaaatattaatgacgccaaaagacattttttcacgttcaattaattcttcaaccattgtcttttgcgatatagttggttctgattcagaccaagaagctaacatatcaattggactcgtttgttcaagtaattcaaaccattcatcactttgtggctttggattcacttctgaagatttggccgtcgaagatgatgtagcaggagatttcacctgtaatttaggcatttgattttcgtgttccattaagtaatacgagcgtgcttgtttacgcatttcttcaaaggataactgttgtccacttgtaattgaatttaaaataacatgcttcatgccatctgctgttaaaccatataaagtcgcgagttgtgtaattaaacgctttgcatctttggtaacaatgtcttgactaataaaatgtttacctaacatttgtctcaacatttcaaagtcaaaagattcatttgataaatcgataccttggtacggttcattaatcggaatatcacttgtatcgatatctatttttgtagacggcactttaaaaacatcagtaaattgtctcgttacctgtttaaattcactcaaatcaatttgttgatactcaaagtatttcttcaactcatgaaatcgacgatgctcaacttcactatataaaaagattgacaacattggatcattaaaaaataaatgtgctgaaggcggttgaattaattggtaaacaaattgtgtttcttgttcatcatgtttgacaaacgcctttaacaatccaatcgcttcaagtaagtccatttgttgtctaaactctagtaaattaattttaagttcattcataaaaatataatgagaaagaatcaatgtttcattatgactttctttaacgaattgagtcataaaatgatataaacccactgcttgtgctccaattagcggtgtatacagtcgattcaatacctctaaatgattcgtatttaaatcaaagtgttgcataactttgaattgatcctttggtcttaagccgaattcgaaggcttgtcgtcccatttaagcatcactccgtttgttttcgcttaaaatcccttgcatcgatgctaacaattgatcaacatctttaaattctttatagactgatgcaaatctaacatatgaaacttgatcaacatgcattaacaagttcataacgtgttcacctatatctcgtgaagacacttccgtatgaccttcatctcgtaattgccattcaaccttgtttgttatgtcttcaagttgttgatatctaacaggtcgtttctcacaagaacgcacaagtccattaagtatcttttctcttgaaaactgctctcttgtgccatcttttttcacaactataagctgactaacttcgatatgttcaaatgtagtgaaacgtgttccacaattttcacattctcttcgtcttcgaatggcatttaattcatcggcatgccttgaatctacaactttagattgtgtagaattacatttcgggcatttcattacatcaccctctttattttgattatgcctaattatactataaatctagagatgaaaaaagaatccctcaatttaattcatttaaccaaataatgaaacaataaaaaacattatatcgttacttatttagtaatatgcatgacaatattattgtattaaaaataaaaaacctaactccgaagtcagagttaggctattaaataattgtattaacttgcacttacagtttcttttgatgtcaaaagtgctccaatttgctcagcaacatctacaactctatttgaataaccccattcattatcataccaagcaataacttttactttattccctgacatgaccattgttgattttgcatcaataatagctgaatgtggattagtattaaaatcaacagacactagtggttgatgttcgacttcaatgataccttctaaacctgcattttcaaaagcttggtttacttcttctgcagttacttctttttctaaatcaacaactaaatcaacgagcgatacattctttgttggtacacgtaatgccatgccatgtaatttaccttctaattctggtaatacttcttttaaagctttcgccgcaccagtagaagtaggaataatgctttcattacatgagcgtgcacgtcttaaatctttatgtggattatcaatatttttttggtcatttgtaatagcgtgaacagtagtcattaaaccattaactattccaaactgattatttaaaacttttgcaactggaccaatgcaattagtagtacatgaagcattactaaaaatgtcaaatgcttctatatctaattggtcatcatttacgcctttaactaccatttgaacatgtccaccttttgaaggaccagttaacaatacttttttggcacctgctttaatatgtgcgatggctttatcaccatgattaaatttaccagttgcatctatagcaatatcgatatctaattctttccatggcaagttttcaggattgcgatcagcaaccaatttaattttatgatctccaacttgcaatccattttcaatcggttcaacttttagattatattttccatgtgttgtatcgtaattgattaaatgtgcaattgtttcgggtggataactagcatttatcgctactacatttaaatttttattttgtaatgcaatacgtaataccattcttccaattctacccataccattaattgcaatattcgttgacattaaaagcaccccttgatttttatgtgttatactttatggaattagtatagcatattatatgaaatttgaaagcgttttccgttgatttatttatcttttttataaaaaatagtcattacttacatacatcaacgcgtacgtaaagtaatgacttatttatagagtaatattaatcttcttctccgtaattcggcttttcaatataaccttcttcttctaacaatctctcaaggttttgttttaattcaagtttatcccctaaattgtcgataacatgatcggccattcggctttttttatcaatagaaatttggctatagacacgagctttcgcatcttctaatgacaaattattacgttgcattaaacgatccatttgtatactttcagaagtgtatacaacccacacttcgtctactgtattttccaattcattttcaaataataatggaatatccatgattacattatatccttgttttaaatattcttgcttttcttcttccataatatctcgcacgataggatgtatgatagcatttaattctaagcgtttttctggatggttaaacactaaatcacccatataacgacgattcatctcaccattttcatcaattgcttcatcaccaaagacttctcgtacttgagctaaacctttactcccctttttaacagcttccctggctgctttatcagcatctactactttaaaaccgaatacggataagagttctgatactgttgattttcctgaggcgattccacctgttagaccaataactttcggcataatttcactctttctttatttttgacatactggacaataatgactatttcttgtcgcgatgatttttgtttcaatttgacttccacacactttgcataccggctgcttatatacattaagatgcaattgcatctcaccagtttttccatcagcatgacgataatctgaaatacttgtaccgccatgcttaataccttcttctagtacttctctaacataataaaaaaccatttcttgttgttggtgtgttaagtcttttacttttttatctggtaaaacacctgcacgaaacaacgcttcacatgcgtaaatatttccgcaacctgcgattactttatgatccaaaatcacttgtttgattggtttattcttattagactgttgatgaattcgatttaaataatacgtcaatgcttcatttgtaaaaggttcaggcgctatttctaaaaatgaaggataagatgctacagacgcaacatttctaatttctccaaaacgacgtatatctgaataaattaactttttgtcatttgacagttcaaaaataacatgccaatgcttacgataattaggtatcataatatcttcaagttcatctacaatgaaaaaaccacccgccatacctaaatggctaattaatgtacgttgttctcgtttattatctagttgaaaaacgatatatttacttcttcgttctacattagtaatggtatagccttccgataaagttttaaaagtatctaattcaattccttttataattgtttccttgccttgagccttaccttcgattactttatccgaaaatataacgtgttcaattttttgatttataacgtagggttcaattcctctttttacatgttctacttctggtaattcgggcataccattaacctcactttattttgcatcataccaagttgcaccataacttgagtctacttttaatggaacatctaattgcaatgcattttccattatctcttctacaaattcactaaatgaatctacttctgacttaggtacttcaaaaattaattcatcgtgtacttgtaataatagtttagcttgatatgttgtctctttcattttttgcgcaaatttaaccattgccagtttaatgatatctgcagcactgccttgtattggcgtattcatagcagtacgttcagcaaagccgcgtaaattaaagttacgactcgtaatatcaggaatatagcgtcgacgatgtagcaatgtttccacgtaacctaaagctttggcatcttttacaatatcagacatatattgttttacacctgggaaactagctaaataatcatcaatgaatgcttttgcttttttacgagtaatacctaaactttgacttaaaccataatcacttatcccataaacaattccaaagttaaccgcttttgcttgacgacgcattaaactatcgacttgatcagcttctacaccaaatactttcatagcagttgctgtatgaatatcatcgccgttgataaatgcttctttcatactctcatcttgtgtaatgtgtgctaatacacgcaattcaatttgagaataatctgctgataatataacgctatcttttgaagttggtttaaaggcttttcttattttacgcccttcttcaagtctaaccggaatattttgtaaattaggatctacacttgataaacgtccagtttgcgctaaagtttggttaaaacgtgtatggatacgttgatcatcactaatcaccttttgcaatccttcaacataagtagactgtaacttagataattgacgatattctaaaatataatcaatgataggatgttcaccttgcaattgctctaagacatctacagcagtagaatatcctgttttcgtctttttaataacaggtaattgtaatgtttcaaacaatacaacacctaattgcttaggagaatttatattaaaatcttcaccagctgcatcatggatatttcgaatcaagacgtctaatttttcttgaatttctttttccatttcttctaaatcatgaacatctgtaaatataccaatttcttccatttcacttaaaatcttagctagcggtagctctaaatcagctaagagttctacctgattgtattcttctaattgtttatccatatttggtttcgcaaagtaaattgcatcagtaatagaagcaacatatggatttaaaacatcatcttcaggcaccttaaatttcttaccttttccatatatactcacatcgtctttcacaaaactttgaccgtacaatgaaacaactgattgaacatcgctaatcgtacgagatggatcaattatataactggccaacataatatcgaatgaaatattttgaatatcaattcctaatctatgtgatgctacatatgtttttttagcatcatatacgacttttttcgtattcggattttctaaccacgaaactagttcggcataattatttatgtcatccgcattaattacaatatgtttttcacctgtaaataaagagaattttaaaatattatttcgcaaatagttaccaccgtctaattcgaaatggatgaccgcttctttcaatgaagtaaaatcaacattatcaaatgacgtttcaatttcaaatgtcttttctattgcatcttcaacgcttgctgattgatcaatgtcagccaacaattgtttgaattctaacttcttaaacaattcgattttttcttgttgttcatcttgatgagtcattaacgtatcttcaagttttacttcaatcggactatctacattaatcgttgctaattctttactcattaatgcatcttctttgctattttgaagtttttcttttaactttttacctgaaatttcatctaaatgttcatagacaccttctactgtgtcaaattggttcagcaattttattgctgttttctctccaacacctgcaacacctggtatattatcagaagtatctcccattaatcctttcatatcaataatttgattaggtgttagcccgttgtatttttccgcaataaagtcaggtgtataatgatcaacatcagtaacaccttttttagtgtaataaatggttacattatccgtagcaagttgtgttaaatctcggtctcccgtaataataattgtctgaaagcccgctttatctgcttctttacttaaagttccgataatatcatctgcctcatagttatctaattcataacgtttaatatgataagcatctaataattggcgtatataaggaaattgctcacttagttcaggcggcgttttctggcgtccacctttatattcactatatttttcatgtctgaaagtcgttttacctgcatcaaacgctactaaaaaatgatttggcttttcttcttttaaaatcttctctagtaacattgcaaaaccatatactgcattggtatgaatgcctgctttgtttgataacaaaggtaatgcataaaaagctctaaaacttaagctattaccatcgattaatactaatttattcacaattttaacctccagaactaatttatatatattttagcatattcgactgtgatgtcgtaattaaagaaactatctcatagagtatttatacacgacctaatttcaaataaaacaagtgactatatagactaagctaaaaaataaaaaagacataatcatgattgttcttgatgagcactccataaagtcaggttaaaagtccaacttttgagatgcacattatcatttcatgattatgtctactttttaatatttttatgctgctattttaaatttttataggtaagaataagttatgaatcgtcagaaccaaatggaatatatttaactttggtcatttttggtaattcttcataattattaaaccactcttggtaatttttattgattggtgacggatgatgcatataatgttcaaaaggcaatgattccactgtataaacctcttgtcgtggatgatctttaatttgttgttttaataactgaactcttttttcatgttcataatgaacataaataaatgcactaagatatatcatagctaaaactagtgatgcaactttaataaaattaacattgattgacttatatttccgaaattcttttaataaaataattaaaatgattacatgtatcgtataaacaatcaaaaaattacctggttcaattggagtaacaatgactagtgtcgacgcagaaacacatattgcaataagtaaggaatataaagtaatttgtgttttacgatcattaatagacaaataaatacctacaaatatcgaaaacgcaaagtaaccacatacaattatgttcgcaaaaccaactaatccaatatctgtatttttatttaataaaaactgattgtaaaatagtaaataataaagcggtaaagtgataaatcctatcataatgatacgacgctttaatattgttaaatgtacataccgatcacttctaagcagtagataaataataagcgctgcaatcatacttaaaattataacctgactgaaaataacaccatatggaagtgatgttgatatcatttctgcaaattttgaaaagataccttgattattagaaacttgttgatattctgacccttcaaataaaattttgcgataatttggattggaaaacataatgattgtacctatagtagcaatcataaatgaaaacaataatttataattaagcgttcgattggcagtaaattcatacagaaaagctaaaattaaaatgatacagtggaataatgtcacattctccataaataattgaccgaagaagcataaaacatagaatagtactgtaacacttaccggctgcttttctttatatataattgcattaatacaataataaatgataaagagtgaaattagtgttgatgtcgcataattgtaaaatcctgcaaaccagccatatgtatctgcataaatagcacttggtaaaattaacattaaagaaaatgctaacaaataatagcttgtccacgctttacaacgtgtaatgtgcataatcatccaaatgatccccatactaatgagaccatatgaaagccaacgtaaccagcttacatgtacagctataatttcaaagatatttccgatatagcgaccattaagtgattcaaatcctacttttaaaatatcagtattataattgctaaaccattgtaaatcatcgtgcatgagtggtagtaagatacccataaaagtataaaacaataatatcgcaattaatatcaaagttgtcttgtgtaattgaattgttttcactttgctaatcctcaaatctagttaaattttcctcaacttgtaggtcgaaaaattaattcaatatttttagtgtatttctaattttcacctatgcatgtttcctcaatcaaattagataaacaaggtatttaatattacttttcaacaatttatctaaatcgcccctcgtctttttctatgacgaatgattacacttgtgtattcaagtgtttaaattaagatttatttccgttcaaataaaacttattactttttaattaagtatctattttaagcgtgttactaaaatttctttattataataaatatattataaaattgcttgattcacaacaatctattacttattacttacaaaacgacatatgcaaatgacaaaattgacaaccgaatttattccacttcattaactctaatttaataccaatagagatttgaacgaaataaaaaagcagcaacaacttcgtgaaaaatacacgcgctgttaccactttaatttttattctttataatcttttagaataactttgaacgttgagcctttgccaacttgactattcacttcaatattgccttggtgggcctctactatatgctttgtaattgataatccaagacctgtcccaccagaatctctacttcgtgctttatctactctataaaatctttcaaaaatacgttgttggtcttctaatttaatacctataccaaaatcttgtacttcgaaaatgacacgaaagtcatctcgatacacacgaacgttaatatctccatcttcataagaatagttaattgcattcgttaacaaattcgtgataacttgagcaattttactttcttgcgctttaacaatgacatctttttcaatatcagtatgaatggaaatatttttttgattggcttgagtcatcatattatcaataatacgccgcgttaaatctgataaattcatatagtctgtatctaactcggtatgttgctcaatatgcgataaatctaacaaatctgttactaaagattctattcgatttgattcttttaaaattatgtttaaaaacatgtctaatgattgtggatcattttttgcaccatcaataagcgtttcagcaaaccccttaattgaagtaataggtgtttttaattcatgtgaaacatttgctacaaattcacgtcttagattttcaagttgtttcaggtttgttatgtcatgcatcacaactaaaatcccttgcaaacttttttgagacctagttaaaatcggaacacaagaaatatcaaagtacttagcatggacttggtttattgcaacttccaattgttcataaataggtttttcaactttaaaactttctaaaattaattgctcaatttcagtattaacatagccgtgatagcctacttgttcaatattatgcgagatgttgaactgttcataatacgctttatttgcaacaacgatttttccatttcgatctatcattaaaatagcacttggaatattttcaatcgttgtttttaaacggttggattgaattttttgctcattattaagcttttgaaggcgtcgtgctaaatcattggtagacacaaaaagcgctttagtttctacaacattactttcaggcacacgtatgtgataataaccatttgccaacaattgtgttgcataagtaacttcttgaatgggacggattaatgtacgcttaaaactacggcttgcaaaatacagacagataagtacaactaaacatgtcaatataagatatttccacaacgtccaatgcatttctgtaatatcattattgtaacctttaatccatacatgataaccgttaaccttcttattaaaaataaaaacgtcctttttttgaatatagttatcactatttgagacagctttcagtttgccactactaaacacctttttatcatttttagttatcaataaatctatattttgctgttttacaatttctttaactttatcaatctcattatcttggactaaataaatatatgatcttgcatctgttgctagagcttgttcgtgtttttctgataaaacatatgtgatggaagcgtgaataataatgcctaatgtaacaaaactgataattaatatactgcttatcaataacattaagcggtggtgaaacttcatcattgttctttaggtctttccaatttatagcctaagccacgcacagttttaataagttgtggcttcttaggattatcttctaatttatctcttaaatgactgatatgtacatcaacaattcttgagtctcctgcaaattcataattccataccgtatttaacatatgctctctcgtaatgactctgccttgtctttctatcaaataaagcaacagttcaaattctttcggtgttagctccaataactcattatgcttatatacttcaaaataatcgggtctaatacgtatcgatccgatggtaatatcatcgtcaatctcttctacttcttttacaaattgagaacgtcttaaaatggctttcacacgggcaacaacttctctaggtgaaaaaggcttagtcatatagtcatcggcacctaattctaaacctaatacccgatcaaattcatcatttttcgccgttaacattaatatagggactaaatttttatttgttcttacagtcttacatacgtcaatgccatcttttttaggtagcataacatctaaaataattaaatctggctgttcattttctaccttttctaaagcctcatcaccatcaaatgcgacaacaacttcataaccagctgtttctaagttatatttaagtaatgttacgattgaatgttcgtcatctactaccaacactttttgcgacatggtatgcctccctaacttataattatatttacattataaccgaactatttataaaaataacatcctacacattatctttacacattttttacattactttacacataaataaaatacttcttatatttccttctataatttgcatgacttactctgggacaacgaaataaattttgtgaaaatatcatttctatcccactacctatgcatgagttttactcatttattcctaagcttatgtacacattcgctttggttaatgtgtaagaaacactacataatcaatcattagtgactctttattatttctgtcctgttgccaacttcaattcatttaaaaaggcgaacctagcaattaaagttgctagactcacctaattttattttgcttattttaaatttttaatcaattcatctgcaaatgctgatgtagaaacttcttcagcaccatccattaaacgggcaaagtcataagtaacaacttttgaagcaattgtatcttcaattgaatctgtaatcttatctgccgcttcttgccatcctaaatgttctaacattaatacagaacttaaaattactgaagatggattcactttatttaaacctgcatattttggagctgtaccatgtgttgcttcaaaaatagcatgacctgtttcataattaatgtttgcacctggcgcaataccaataccaccaacttgtgcagctaaagcatctgaaatatagtcaccattcaagttcatagttgctacaacatcatgctcagctggacgagttaaaatttgttgtaagaaaatgtcagcaatagaatctttaatgataatcttgccttctttttcagctttttcttgtgcagcattagcagcatctctgccttctttttcaacaatttcgtcatattgttgccaagtgaatacttgatcaccaaattcagttaatgctaaatcgtaaccccactgcttaaatgagccttctgtaaatttcataatattacctttatgaactaaagtaactgatttacgattattatcgatagcatattgaatagctgctctaactaatcgctcagtaccttctttagaaactggtttaataccaatacctgatgtttctgggaatcgaatgtttgtcgcacccatctcgttttgtaagaagtcaattacttttttaacttctgttgtaccttctttaaattcaataccagcataaatgtcttcagtattttcacggaaaataaccatatcaacatcttgtggacgtttaacaggtgatggtactcctttaaaccaacgtaccggtcttaaacaagtaaataaatctaattcttggcgtaaagctacatttaatgatctaataccaccaccaattggtgttgttaaaggtcctttaacagcaattaaatattctttaattgtatcaagtgtttcttgaggtaaccattcgccagttgtatcaaatgctttttggccagctagcacttctttccattcaatgcgtttttcgccattataggctttctcaacagcagcatctataactcggcttgctgccttccaaatatccggtccaattccatcaccgataataaatgggataattggttcattaggtacgtttaatccttcagttccttgagtaattttttctgcagtcatagttattttacctccaaattttacatcttcatttttaatttgtattgattattttctttcttcaagcggaatatacttacgattcgtttcgccaatatattttgctctaggacgcataattctattatctttatattgttctaaaatatgagcaatccatcctgcagaacgacttacagcaaagattggcgtgaataaatcatgaggtatttccatacagtggtaaacactcgcactataaaaatcaacattaggaattaatcctttttcttctgccatacgtttttccattttcactgacatttcaaataattcttcacgaccagcgtctttcgtaatttgacgactcatttctcttaaatatttcgctctaggatcgccatctttatatacacgatgaccgaagcccattactttatctttattagcaaatttttcgtctaagtatgcatcaacattttcaattgacccaatctcagataacatcgtcataacttgttcgtttgcaccaccatgtaatggccctttcagagaacctacagctgctacaatacctgagtacatatctgacaatgatgaaaccgcacaacgtgctgtaaatgcagatgcgttcaactcatgatcagcgtgtaaaataagtgctttattgaaggcttctacttctatatctgttggtaattccccacgtaacatatataggaagtttgccgcataacttaagtcaggattaggcttaagtggttctttatcttgtcttactcgagcaaacgctgtaactaatgatgctactttagcctgtatacgcattgctctttcataacgattttcatctgattcattttcagcatcaggatcgaaatgtgcaatatatgataatgacgtacgtaatgctgtcattggatgcacgtgatctgtaacatactcctcaaaatgtgtatacacacgaggatttaatgtcatgtattgatttaatttcccttttagatgagcaagctcttcttcgtttggcaatctatagttccataataggaaaataacttcttcaaattgcgcattttcagctagatcatcaatatcatagccggcataagtcaattgactttcaataattgaacttattttagtctccgctgcgataaccccttctaaacctctttgtaattctgccatgataaatttcccctttactgtttctttatgaaatggctttcaactaatattatagctaaacgcatttcgtttgtgaaatataaaaaccggcattatatgtgcaacaattattttgtaaatctatgtaaatgtcacagaatagccacaaatagcaccattaaagctttttcaagatgtgaataatccatgaattttacaatagaattaaattttcaattggttattatatatgattataaaaaccaaagtatattaacatggaattttacacatttttaccgaaaataattgtatatatctcaatataagtgcataataaacatatctatatttaagggagatgtattatggctgaaaaattacaaagggaactgagcaatcgccacatacaattaattgcaattggcggtgcaattggtacaggcttattcttaggtgctggtcaaacgattgcattaaccggcccttcaattctattaacatacatcattataggatttatgttatttatgtttatgcgaggtttaggagaaatcattatacagaataccgaatttaaatctttcgcagatgtaaccaatacatatattgggccttttgcaggatttgttaccggatggacatactggttctgttggattattacaggtatggctgaagtaacggctgtggcaaaatatgttagcttttggttcccagaaattccaaactggataagtgcactattttgtgtactgttattaatgtcattcaacctacttagcgcaagacttttcggagagttagaattttggttctctatcattaaaatagcgacaattattggtttaatagtagttggtttcgtcatgattctatttgcatttaaaactcaattcgggcatgccagtttcacaaatctatatgaacacggcatattcgctaaaggtgcttctggattctttatgtctttccaaatggcattattctcatttgtaggaattgaaatgattggtgttacagctggggaaacaaaagatccagttaaaacaattccaaaagcaattaacagtgtacccattagaattttaatattttacgttggtgcgttagcggttatcatgtctattatcccttggcagcaagttgaccctgataacagtccattcgtaaaattattcgcattgatcggaattccgtttgctgcgggcttgattaattttgtagtattaaccgctgctgcttcatcatgtaacagtggtatattctcaaatagccgtatgcttttcggtttatcaagtcaacaacaagcacctccgaacttttctaaaacgaataaatatggcgttccacatgttgcaatctttgcttcatcagcattattacttgtggcagcattactaaactatattttcccagatgcgacaaaagtatttacgtatgtgactaccatctctacagtgttatttttagttgtatggggtctgattatcattgcatatatcaattatagtcgtaaaaacccagatctacataaaaatgctacgtacaaactattaggtggtaaatatatgggttacttaatatttgtattcttcatttttgtgttcgggttattatttattaatgttgatacaagacgtgcaatttattttattcctatttggtttatactattaggatttatgtacttaagatataaacgtatcgctgctaaatcaaataaataacaacaagttttacccctgttgaatatattaaagttcaacaggggtttttatatgcaacttataatattaaattgcgtacttggctcaatacttttactttctcatctatttaatcatgtatcatttcagaaatacatccatacttctattttataataactttccaaattaatatgagtgaaagtttaaaggtgataacctacatgtataaaagatataaacatttatatattgattgccattcatacactctcattatcaaataacctattaattacgtcataaaatacctgatgaaccaaaaaacgtctttccattgttaataaatggaaagacgttttttttataaattatagtacgtttgcatatccttcaaagattttaccttgagcagcatcaatcgtaactaacatgttattgcttatgtttttaacagctttttctacacctacaactgttggaatacctttttctaaaccaacaattgcacttggtgatgtaataccattttcttctgtaattaagcctaaagctttttctacataaggtacaaacgtttcatcgattgagttagtaacgataactttgtcagataaatctttaccttctaaatctttaacagtttcagcaactaacgtagtaccaacaactgatccacgtccaataccttgaccattagcaatttcgtcaccaactaggtggattttcatcatattagtagttccagtttcaccagttggtacaccagcagtaataatgattaaatcaccattagttactctaccagtttcaacagctgttgcaactgcattgtttaacaatgcatctgtactcttacgtccttttttaactacaggttgaacaccccaaacaattgaacattgacgtgcagtttcttcacttggtgtcactgcaataatgtctgaatgcggacgatatttagagatagtacgtgccgttgaaccactttcagtagcagctacaattgctttaacatttaagtttaaagctgtatgtgcaaccgaaataccgatagcattcactaatgaagtttcaactaatttagtacgatctgacaataactttttgtaatcttgggctgcttcagctgatacagcaatatttctcattgttttaacagcttcttcaggatataaaccagcagcagtttcaccagataacattactgcatctgtaccatcatagattgcgttggcaacgtcactagcttctgcacgtgtagcacgtgggttacgttgcatagaatctaacatttgtgtagctgtaataactggtttacctaatttgttacattgtctgattaaatctttttgaaccattggtactttttcaggtggaatttcaacacccatgtcaccacgtgcaaccattaaaccatcagacacttcaagaatttccgcaatattatcaataccttcttggttttcaattttagggaatactgaaatgttagctttttgttcttctaaaatttcacgaatttctaaaacatcactaggacgacgtacgaaacttgctgcaatgaagtcaacattttctttaataccgaaacggatatcttcagcatctttttctgtaataccaggtaaacttactcttacaccaggtaagttaacaccttttttgtttttaagctcaccagagtttaaaatatcacatttaacttcttttttagcatggtcaatatctttaacttgtaattcaattaagccatcatcaagtaaaatgtatgaacctacttgaacatcgttaattaagttttcatatgttactgagaacttttcaggtgttccttcaacttcattcatgctaacaataacttcgttaccacgttcaagttcaatgataccgtctttcatattatgcgtacgaatttctggacctttcgtatctaatagaattgctacaattttgtctaatcttttagctactttacgaattgtatcaattctacctttatgctcttcatgactaccatgtgaaaagtttaatcgtgcaacgttcataccagcattgattaatttctcaatcatttcttctgattctgaagctggtccaattgtacatacaattttagtttttctcattttataattcctcctgaaatcttatatagataacttgttagcaagttcatatagactataatcaaatttatgatctttaccatcaaaaatttcatcaaaagatgttgctacaattttattgttcttaattccaacacccttagctgtttcaccttgcattaataagtctaccgcatatccacctaaacgtgatgctaaaactctatccgcacctgttgggctaccaccacgttgaacgtgacctaacacagacactctattatcaacattgatgtattgtgataattctttttgacaatcttgcgcagtcatacaaccttctgctacaagaacgattgagtgtttcttaccacgtttaataccttgttcaattttatcagctatttctttaatatctgttttcacttctggaactacaattgtctcagcaccaactgataatccagcccataatgctagatctccacaatcacggcccattgcttcaatgataaatgttcgtgcgtgacttgacgcagtatctctaattttgtcgactaatccaataatcgtatttaatgctgtgtcaaatccaattgtaaaatcagtaccattgatatcattgtcaatcgtaccaggaataccgatagtttgaatttctttgcattcctcactgatgcgttgtgcaccgcgataactaccgtcaccaccaataactacaaggccctcaatccctcttttacgtaagttttcgattgcaactttacgtacttcttgctccttaaactctggacatcttgctgaatacaagaatgtacctccacgctgaatcgtatccccaactgatcctaattcaagtttatgaatatcatcatttaacaatccttggtaaccatgatacacaccataaacttcaatttcattgtaaattgctgtacgaacaactgctcttacggcagcattcattccaggtgaatctccaccactagttaaaactgcaattttcttcatgacgacatacctttctataactgatttatctttaactctaaattaccacaaattgatatgtcattccatcaaaactaatgtattgaattgatgtaaacgttttaaatattgaattttattttaacttaattaaaaaaagattagtagccacaattttgactactaatcttagttaaaattcagtatctaaatataaaattattgttctaatgtacttcaatttatgataaaacccagtatcaatttaacataaaaatgctcaagttgattattctatataagaaccgatatttctgaatttttcaaaccgatcattagcaatttcatcacgtgataatgactcaagtgaatctaactgttcaacaaacgctgatttaatagctaaagcttgctgttcaatatctttatgtgcaccgccaagtggttcagaaatgacatcatctataatacctaattgcttaatatcatgggcagtaattttcattgtttcagctgcaattttagccaaattactgtctttccataataatgccgctgcaccttcaggagatataacagagtaagtactattctctaacatcaatactttattggcaataccaatacctagagcacctccactgccaccttcaccaatgacaatcgcaataactggtacttttagtgaagccatctcaatcaaatttgttgcgatagattcactttgtccacgttcttcagcagctttaccaggatatgcaccttttgtatctataaatgtaaagataggacgattgaatttttcagcttgtttcattaaacgtaatgcttttcgataaccttctggatgcgccataccaaaatttcgataaatattatcttttgtatcttttccacgttgttgtccaataaccgtaacagcacgaccatttaaaaagccaataccaccaatcattgctggatcatctctaaaattacggtcaccatgtagttccataaacgattcaaagatatatggaatataatctagggtcgtaggtctttcttgcaaacgcgcaatttgcacacgatcccatggttttaaatttgtatatatttttttagtttctcgttccaatgacgcttcaagcatgtcaatttcttcttgtaaatccacatcatttttatcttgagattcttttaaagattcaattttatttcgaatttcaaaaagtggtttttcaaaatctaacattatttagtcacctcttgatggatttttagaatttcagacaatgtttgacgcatatcattacgatgtacaactttatccaactgtccatgctctaataaaaattctgcagtttggaaatcatctggcaatttttcgtttattgtctgttcaataactcgacgacctgcaaaacctatcaacgcttttggctcacttagatttatatcaccaactgatgcaaaacttgcagatacaccaccagtagttggatgtgttaaatatgatatatataatagtccagcgtcagaatgacgttttaaagatacactggttttacccatttgcatcaaggaaataataccttcttgcatacgtgcaccaccacttgcagagaaaagaataaatggtaaacggttctcagtgcagtaatcaatgatgcgacatatcttttcaccgataaccgaacccatacttcccattctaaaacgtgaatccatgacagcaacgccaaatttcataccatctagttgcgctgtaccagtcactactgcttctttaagacctgtcttttgttggtccttttcaattttttctatataacttggaaaatctaatggattcgcagaggtcattcccttatcgaattctgtaaatgatccttcatcagaaattgcttctatacgtttatacgcagttaaagcaatatgatgatcacaattaaagcacacatttaaattttcagctaattcttttgtgtacataattttcttacactttggacacttagtcataatacctgcaggcacatcattatttttagagtcttgtactgtaagatatttctttttctttgttcgattaaaaaaatctttaaacataggaaaacctccaaataacctctgttctaaccatttagagccttaaactgaacttgaccagttaaaaacgggtttaaatttatttgatttatattcgtttgactgttgaatgtttatcataaactttcattttcatcattttaatgactctttattgctaacttttaagcaatttaattaaacgttaattatttttattgtaaatctgtaagtttcattgttttatcatacacatcttgcggatcaacttcaatcctagctactccagattccattgccgctttagcaacattacgagcaactgatggcgctacacgtttatcaaacggtcctgggatacagtagtcttcatttaattcagaactatcgattaaatcagcaatcgcttctacagctgcctttttcatttcttcatttatatgtgtagcttcaacctctaatgcacctctaaaaataccagggaaagctaatacattattaatttggttaggatagtctgaacgtcctgtaccaactactcgtgcacctgccgctttggcatcatcaggtattatttcaggatttggattagccattgcaaatataattggattatctgccatactcttaaccatatcttgtgacagcgcattagctacagaaactccaataaatacatctgcgtcttttacgacttcttctaaagacccttcaatcttatctttatttgtccatttagctacaacatctttcgtaagattcataccatatgaacgtccttcaaaaattgcgcctcttgagtcacacataaccatatttcttacaccatacgcgtatagtaatttaacaatggctattcctgctgcaccagcaccatttagtacaacttttattttagcaatatctttgttaacaactctcaatgcatttaccaaacctgccattgtaacaattgctgtaccatgttgatcgtcatggaataccggaatattagtttcttttttcaatcgttcttcaatttcaaaacaacgtggtgccgaaatatcctctaaattaataccaccataattaggttctaacaacttaactgttttaatgatttcttcggtattagttgtatttaacgcaataggaaccccattgataccagcgaagcttttgaataatactgctttaccttccattacaggaatacttgcttcaggtccaatgttccctaaacctaataccgctgttccatcagtaataactgcaactgtatttcctttaattgtgtaatcatacacctttcttttatcttcatatatatctttacacggttcagcaacgccaggtgagtatgctaaacttaattcttctttattagtaacttttacatttggtttaacttctaatttaccttgattacgtttgtgcatttccaatgcttcatctcttaatgacatgaaatcagcccctaattcaatatttatttttaaaaaataacttggataaaacgcattacattataaaagtaaaaatattgggtaaatctgaatgagtaagaatttatggttttgattatgtaacacaaatagcgataaacgataataaaataatatttttaaagatacattaaatcatactatctaaagatatacctttaattattataatggatagcaaaaaccaatatatcaaaaagttattattttttcgtacgatatatcgacaaaattctttactcaatttatgtatactgctttttgtgctaattattcttatggattaatcaataatgtatagtgaaactcataaaaataataagcataaaaaactaatataaacgcaaactgatggttaaaaaatatctaaccatcagtttactatatcataatttattagttgataaaagttatataagcctaatatcactagggttaaaggattgtataaaattattaaacatactatctttttgattaatatagcctaaagtagtcatttgtttaatcgtttcatcataaaaggataacacaacatcattagcattctctttcgtagctttaatcatctcttcaaacgtatctatatgtgatttatttctaattataatttgtttggcaaatgctaatttttgttcttcaaaagtggctaatgtctgaatctcatttataattagttgacgttgttgctttctaaagtcaaatttcccgctaactataaacaagtcattatgtgataacaacgcttcgtactttttaaactgattagggaaaatcacaccatctaaagtttcgatgccatcatttaatgtgacgaatgccatattttgaccatttttagttcgaatttgtttaactttatcaaactgaactaatataggcttattattctgcgcgttactcaatttaaatattgttaaatattgtttggcaacaaactttttatctactgggtgttgcgaaacataaaatcctaaatattctttttcatactgactaataagtgcatcaggcaattcttctttatcttcatacatctgttttggcgttaaaatatcaaataaaaaaccatcttgttcaatgtttaaatcaccatccaacacttgatcaatagcttgcaacaacgttgaacgtgttttaccaaaagcatcaaacgctcccactaaaatcagtgcttcaagtaactttctcgttttgactctcttcggtatacgtctagcaaaatcaaagaaatctttaaatttgccgttctgataacgttcatcaacaatcacttttacactttgataacctacacctttaattgtaccaattgataaataaatgccttcttgggaaggtttataaaaccaatgactttcgttaatgttcggtggcaatatagtgataccttgtttttttgcttcttctatcatttgagcagttttcttctcacttccaataacattacttaaaatatttgcgtaaaaataatttggataatggacttttaaaaagctcataatgtatgcaattttagaatagctgacagcatgtgctctaggaaaaccataatcagcaaatttcagaatcaaatcaaatatttgcttactaatgtcttcgtgataaccattttgctttgcaccttctataaaatgttgccgctcactttcaagaacagctctattttttttactcattgctcttcttaaaatatccgcttcaccataactgaagtttgcaaatgtgctcgctatttgcataatttgctcttgataaataataacaccgtaagtattttttaatataggttctaaatgtggatgtaaatattgaactttgcttggattatgtcttcttgtaatgtaagttggaatttcttccattggacctggtctatacaaagaagttacagcaacaatatcttcaaagtgttccggctttaatttttttaatacacttcttacaccgtcagactctaattggaatatgccagtcgtatctccttgcgacaacaattcaaacactttttgattatcaaacggaattttttcgatatcaatattaatacctaaatcttttttgacttgtgtcaagatttgatgaataatcgataagtttctcaaccctagaaaatcaatttttaataaaccaatacgttcggcttcagtcattgtccattgcgttaataatcctgtatcccctttcgttaaaggggcatattcatataatggatggtcattaataataattcctgccgcatgtgtagatgtatgtcttggtaaaccttctaactttttacaaatactgaaccagcgttcatgtcgatggtttcgatgtacaaactttttaaaatcgtcaatttgatatgcttcatcaagtgtaattcctaatttatgtgggattaaacttgaaatttcatttaatgtaacttcatcaaaccccataattcgtccaacatctctagcaaccgctcttgcaagcagatgaccgaaagtcacaattccagatacatgtagctcgccatatttttcttggacgtactgaataaccctttctcggcgtgtatcttcaaagtcaatatctatatcgggcattgttacacgttctgggtttaaaaaacgttcaaataatagattgaatttaataggatcaatcgttgtaatacctagtaaataacttaccagtgagccagctgaagaaccacgacctggacctaccatcacatcattcgttttcgcataatggattaaatcacttactattaagaaataatcttcaaaacccatattagtaataactttatactcatatttcaatcgctctaaatagacgtcataattaagttctaatttttttaattgtgtaactaagacacgccacaaatattttttagctgattcatcgttaggtgtctgatattgaggaagtagagattgatgatattttaattctgcattacacttttgagctataacatcaacctgcgttaaatattcttgattaatatctaattgcttaatttccttttcagttaaaaaatgtgcaccaaaatcttcttgatcatgaattaagtctaattttgtattgtctctaatagctgctaatgctgaaatcgtatcggcatcttgaggtgtttggtaacaaacagtttgaatccatacgtgctttatcccttgaactaaaacactttgatgatctaaatacgtatcttcatgcgaatcaaaaacttgaacaatgtcacgatgttcgtctgcaacatttttaaaaatgataatcaaattcgatgaaaattgttgcaatagttcaaatgaaacattttccattgaattcatttttattttcgatgaaagttgatataaatccttcaacccattattatcttttgctaaaacaacggtttcaatagtgtttaaaccgtttgtcacatatattgtcataccaaaaatcggtttaatgttatttgctatacatgcatcataaaatttaggaaaaccatacaatacattggtgtcagttatggcaagtgcatcaacattttcagacacagcaagtcttacggcatcttctatttttaagcttgaatttaacaaatcataagccgtatgaatatttaaatatgccaccatgattgaatggctcctttctattagttaagttttgtgcgtaaagctgtagcaagttgctcaaattcatcccagctgttcactgaaactcctgacgcattcggatgaccaccgccaccaaaatcttgcgcaatatcattaataatcaattgccctttagagcgtaagcgacatcttatttcactaccctcatcaactgcaaacacccatattttcaaacctttgatgtcagcaattgtattaacaaactgagatgcttcatttggctgaataccgaattgctccaatacatcttcagttattttaacttggcagaatccatcatccataagttcgaaatgttgtaaaacataaccttgaaacggcaacatttttggatccttctccatcattttatttaaaagcgcattatgatcaatatcatgcccaattaactttccagcaatttccatagtatgttctgaggtattgttaaaaaggaatcgcccagtatcaccgacgataccaaggtataaaacactcgcgatatctttattaacaattgcttcatcattaaaatgtgagattaaatcgtaaatgatttcacttgtagatgacgcgttcgtattaactagattaatatcaccatactgatcaactgcaggatgatgatctattttaataagtttactacctgtactataacgttcatcgtcaattcgtggagcattggcagtatcacatacaattacaagcgcatcttgatatgttttatcatcaatgttatctaactctccaataaagcttaatgatgattccacttcacccactgcaaatacttgcttttgtggaaatttctgctgaatatagtatttcaaaccaagttgtgaaccatatgcatcaggatctggtctaacatgtctgtgtataataattgtatcgttgtcttcgatacatttcataatttcattcaaagtactaatcattttcatactcccttttttagaaaagttgcttaatttaagcattagtctatatcaaaatatctaaattatataaattgttactaccatattaaactatttacccgttttaattatttagatatatattttcatactatttagttcataacgagtataggacatcaatcaatattatattagcaacagttgaccaaataaaaaatacacatataacaagctttttaattccggggccccaacatagagaaattgggtccccaatttctacagacaatgcaagttggggtgggaccccaacatttgtgtgaaatctatcttatgtctattttctctgctaagttcctatacttcgtcaaacatttggcatatcacgagagcgctcgctaccttgtcgttttgactatgcatgttcacttctattttggcgaagtttcttccgacgtctagtatgccaaagcgcactgttatatgtgattcaataggtactgttttaatatacacgatatttaagttttctatcatgacattaccttttttaaatttacgcatttcatattgtattgtttcttctataatacttacaaatgccgctttacttactgttccgtagtgattgattaacagcggtgaaacttctactgtaattccatcttgattcattgttatatatttggcgatttgatcgttaattgtttcacccatttgaggctgtcttcctaaaagttgcatagactttaaaacatcttgtctattaatcacacccactgtctttttattactcgaaacgacaggaatcaattcaataccttcccaaatcatcatatgcgcacaacttgctactgtactcatagcatttacataaataggatttcgcgtcatcactttatctatttcgtcgtcgtcctttgtattaatcatctctctacttgttacaatacctactaatttataagactcattgactaccggaaaccttgtatggccagttcgattcgccatacgcttataatctgctattttcatcgtatcaaacagcacagataaatcatctaatggcgtcattatatcttgaactattaagatatcttttcgtattttctgattaaaaagtgctttgttgataatatttgcaactaggaatgtatcataacttgatgatagaacaggtaaatcatgttcattcgcaaaattaataactttattagatggcttaaatccaccagtaattaatatagccgtgcctctttttaaagcttcaatctgcacatcttcgcgatttccgacaatcaataatgtctttggaccaatatactttaaaatatctttgagttccattgctccaattgcaaatttagataccatcttagtgatacctttgttgccacctaacacttggccatcaataatattgacaatttcattaaaagttaaatgttcaatttcattacgattacgtttttcgattcgaaccgtaccaacacgatctatcgttgcgaccatgcccattttatcagcatctttaattgcacgatatgctgtcccttcggatacgtttaaaaatttagcgattttacgcaccgaaattttagagcctatagataacgattcaatataatctaaaatttgttcatgttttgtcattctttacctcttcttttcgaacagtattaactacattataactttattttggataaaaagcattgaagtgaaatgaaataatgatcgtttcacctattttattttttgaaaatatacaacaaacactaagatcacaaaatctttaattttaaatggaaaaatccattattatttattagaatgtaagtgaggagggatgtactaatgtataaaaatatattacttggtgtagacactcagttaaaaaatgaaaaagcactaaaagaagtgtctaaattagctggcgaaggtacagtcgtaacagttttaaacgcaatcagcgaacaagatgctcaagcatcaattaaagcaggtgttcatttaaacaaacttactgaagaacgaagcaagcgattggaaaaaacacgcaaagctttagaagattatggtattgattatgaccaaataattgttcgtggtaatgcaaaagaagaactattaaaacatgctaatagcggtaaatacgaaattgttgttttaagtaaccgtaaagcagaagacaaaaagaaatttgtacttggaagtgtcagccacaaagtagcaaaacgtgcgactatccctgtattaatcgttaaataaaatttttatccagaatcacaaataatctttcaatcatgatgcagtctcaaacgactgagtaaacacaagaaatgattatgactgtggttctggtttttttatattattcactaactaaccaacaacttgtatcaaacaaaaccattttgaaccaaaaacataatcaatatcataacccagcaggagttgactatagggccccaacatggagaatttcgaaaaagtcagcttactataatgtgcaagttggggtgggccccaacatggagaatttcgaaaagaaattctacagacaatgcaagttgggctgggtcccaacatagaagctgacggaaaagtcagcttacaatatcagtagaatataaaaacactcactaaaaatatgcggacgataacttccacatagattagcgaggtgttttttagtgtaaaatctatattctatttaaaactgaacagattcacctggttttaaaatttgcacgtcccctacattaacagcatctttaaattgttgtggatcttgttcgattaatgggaatgtatcataatgaatcggtacagaaatttttggtttaataaattcattaatagcataacttgcatcatcaatacccatcgtaaaattatctccaattggtacaaaacatacatcaactggatgacgtttcgcaataagtgacatatcactaaacagacctgtatcaccagtatgataaattgtttttccttcaacttcaaacacgatacccattggcatacctaaataaactggaataccattttcatgtgtaaaacttgaactatgaaatgcttgaacaaatttaacgcttccgaaatcaaagtttgctttaccaccaatattcataccatgaacattttcaacaccgtgatatgaagaaagatagtcagccatttctgcacttccaattactgttgctcttgttttctttgctagttccacaacgtcaccaaagtgatcaaaatgaccgtgcgttaaaacgatatagtctacctgcactgtttcaatattcaaatcacacttagggttatttgatataaacggatctacgataacctttttgttgttcccttctaaataaatcgttgattgaccatgaaatgataacttcatttgagcatcctcctatcaattgctatataaatttagtacccttttgccacttaattataacaaattctcaaattttaaaaattgaaaatctagttaatgtattagctcgattttgaaatctaataataattggcataaaatgtaagtaatattatgttgaggagtgtttataaaatgacaaaaatatcaaaaataatagacgaactgaacaatcaacaagctgatgcagcatggattacaacaccgttgaatgtatattattttactggataccgtagcgaaccccatgaaagattatttgcattattgattaagaaagatggtaaacaagtactattttgtccaaaaatggaagtcgaagaagtcaaagcatcacctttcacaggtgaaatcgttggatatttagacactgaaaatcctttttcactttatcctcaaacaatcaataaattactaattgaaagcgagcacttaacagtagcacgccaaaaacaattaatctctggtttcaatgtcaattcattcggagatgttgatttaacaatcaaacaattgagaaatattaaatccgaagatgaaattagcaaaatacgtaaagctgctgagttagcagataagtgtatcgaaataggtgtttcttatttaaaagaaggtgtgactgaacgtgaagtagtcaaccatattgagcaaactatcaaacaatatggcgtcaatgaaatgagttttgatacgatggttttatttggagatcatgccgcatcaccccatggcacaccaggagatcgcagattaaaaagcaatgagtatgtactatttgatttaggtgtaatttatgagcattattgtagcgatatgacacgtaccatcaaatttggtgaacctaacaaagaagcacaagaaatttataatattgtattagaagcagaaacatctgcaatccaagcaattaaacctggaatacctttaaaagatatcgatcatatcgctagaaatattatttcagaaaaaggttatggtgaatatttccctcatcgcttaggtcatggtctaggattacaggaacatgaatatcaagatgtttcaagtactaattctaatttgttagaagctggcatggttattacaatcgaaccaggtatttatgtaccaggtgttgcaggtgtaagaattgaagatgacatacttgtcactaatgaaggatacgaagtattaacacattacgaaaaataaggagtgggacaaaaatgaaaagcttgttacaagcgcattctcattcagtcaaacactgccaatacaacattgtagcgcctaggacataaatttttgtccaagtctaaatgcaatatataacaaacaagctagaaacacatatgcaggtacgttcatcagtaacatgtaatgaatcaaatcaatatcattcatgttcgatgaattcttcgcattgtttctagctttaatgtatcattatttaattttaataaccaaggagatgataacgtcattctttagtacgctgtaatccattcccttttcattaaattcaaattataattgtaatgcttcttctacagatttatattccatttcaaatgcctctgcaacgcctttattggttacgtgacctttgtaagtatttaaacctaatgataatggttgatttgatttaaatgcttctctataccctttattagctagcatgagcgcataaggtagcgtagcattatttaaagctaacgtcgaagtacgcggtactgcacctggcatatttgcaactgcataatgaaccacaccatgcttaatatatgtaggatcatcatgtgtcgtaattttatcagttgtttcaaaaataccgccttgatcaatagcaatgtcaataataactgacccatttttcatttgtttaatcatgtcttctgttacaagtcttggcgctttagcacctggaattaaaactgcacctattactaaatcactttgtttaacatacaactcaatattcaacggatttgacataattgtatgtacacgtccaccgaataaatcatctaattgttgtaaacgctttggattaacatctaaaatcgtaacatctgcacctagtcctagtgcaattttagctgcatttgttcctgcttgaccaccaccgataatagttactttacctttaggtactcctggaacgccacctagtagaattcccataccaccattaagtttttgtaggaactctgcgccaacttgagcggacattcttcctgctacctcactcattggtgataacaatggtaaagatcggtctggtaactgcacagtctcatatgcaatactaattacttttctatctatcaaagcttgtgttaatttttcttcatttgctaaatgaagataagtgaataatacaagcccttctttaaaatatggatattcagattcaagtggttctttaactttaataaccatatccacatcccaaacttttgcttgttcaggaacaatctcagcacctgcttctttgtaatctacatcttcaaagaacgatcctgaacccgcatttgtttccactaaaacagtatgcccactttctactaaagcgtgcacaccacttggtgataaaccaacacgattttcattatttttaatctcccttggtataccaattttcataccatccacctccataatcatcttaacgcgaacattttgaaagcgcaatcaaaaatccacaaaattgtaaaggttattacactgacttttccgaaaattgtggtaaaatataattaagaaagaacaaggaggcacttactatgattacttacaaaaatattttaatcgcagttgacggttcacatgaagcggaatgggcatttaacagagcagttggtgttgctaaacgtaacgatgcgaagttaacaattgtgaatgtaattgattcaagaacatattcttcttatgaagtttatgatgctcaatttactgaaaaatctaagcattttgcagaagaattattaaatggttataaagaagtagctactaacgctggtgttaaagatgtagaaacgcgtctagagtttggctctcctaaatctatcattcctaaaaagcttgcacatgaaattaatgcagacttgattatgagtggtacatcaggcttaaatgccgtggaaagatttattgttggttctgtatcagaatctatcgttcgtcatgcatcatgtgacgtgttagttgttcgtactgaagagttaccagcagacttccaaccacaagttgcaacaactcaattacgtgaaaaatatcaaaattaaatatagatgatcattagataactacttgatcattatgaaccaagtgcaactgtctgcacttggtttttttattgtttataaataaaactcatttaataatgttttcataatcttctttgactactcaatttttaagatatttgtgaaaagagacattacactagttaattttcaaacaatacaaaaagcgtctacctcctacatataattgtagcggagatagacgcttaatatttattaaaaaattattttaaaccaccgaatgtcataacatcacgggcaatcatgctttcttcatctgttggaataacgacaactttaactggtgaatgaggatagttaataaatccttctttaccacgtagtaagttttcatttttcttaggatcccagtaaacacccataaattctaagccttcaagaactttcgcacgaatttcaactgagttttcaccgatacctgctgtaaatacgataacatcaacaccatgcattctcgcagcatatgatccaatatatttgtgaattttagaagcaaatacatctaaagccatttgtgaacgtgctttacctgattcagcttcttctgataagtcacgtaaatcactagatgtacctgataatcctaataaacctgattctttgtttaagatttccaatacttgttcagcagttttaccagttttttccattataaatggaattaaagcagggtcaatattaccagaacgagtacccattgttacaccagcaagtggtgtgaagcccattgatgtatcaatagatttaccgccatcgatagctgcaattgatgcaccattaccaatgtgacatgaaataatacgtaaatcttcaattggcttatctaacatttctgccgctctttgtgatacaaatttatggcttgtaccatggaaaccatacttacgaatgccataatctttataataatgatatggcaagctatatagatatgctttttcaggcattgtttgatggaatgctgtatcaaaaattgccacatgagggatatttggtaataatttacggaaagcacgaatacccatcaagttagctgggttgtgaagcggtgctaattcgcttaattcttcaatttccttttcaacctcatcagtaatagctactgattcagggaatttttcaccaccatgtacaacacggtgacctgttccatcgatatcgttaatatcattaataatattgtgcgctttaaaagcatccaacatgatatcaactgcctcaacgtgatccttgatatcttgtactgttttaactttttccccgttgacttcaattgtaaaaattgaatccttcaatccgattctttctactaaaccttttgttactaattcctcttcaggcattctaattaattgaaattttaatgatgaactaccagcattgatagccaagattaattttgacataagtaatgatcctccatcgtttgctttttatactatttcatttctcattttatcattcatacagttttatgactatactattacagattattttttaggacgatttgtgtccatccactgatttaactctgtcataaatccttgaaattgtgaaggatttttgaaatcaggaatatttgccaataatacttcaactggctttgtttcacccgattttttcttttgtaaaattaatatagattttcgcgctttttcatttttaaataaagttggtggtaaatttaaaaatgcttgcatctctgtctctgttgcaatatatttttcaagctgttttacatgctcgcctgtaaaaatattacttggtaccactagaaaggcatatccagcatcttttaatgcatttattgcttgttctattaataaataatgtgaataactatgtccttcttcgaaacctagcttaaactccttacttctttcatcaattggataatagcctactggaaaatcaccaataacgatatctgcttcttctaacggtagtggcataatggcatcttgaggatacacatcgaaaggaatttctaagaagtttgctaaatgtacactaacacgtgataaaactggatcaacttcaattaaatgatgcataaccgcaatttcaggtaacacttcttttacagtagcacttaaatgaccggcaccacttgcaatatcaacaatatgtaattcttcttggttgttcataaaacgctcaactaaaaatcctagtatcaagccaattgaatctggtgtaatttgatgatttgcttgtatcttttcttcctgcattaaacttaaatatgcaaattggaatgctttacgtcgatcttgtaacgtcgattgttctaacaatcctctttcatcggtatatacttgttccattgctagtccaagattttcaataaaactttggccattttcattatttaatgttttagctttttcatctaatgtatgaaacaagcgttccataattgtttgttgttctgccatattcgtccctctccaataaaaagtgcccataggtcttagcaatcatagaaaacaattctattttaatgctgttgacaacgatggacacgatgtatacattttaagatttatctctttaatgattaaatatttttgtatgcagttaaagcagcatcaaaatcagggaaatcagtaccttcactaacgatttctttataaaccactttattatctgcatctaatacaaatactgcacgagctaataagcgaagttcttccataacaacgccatagttttcaccaaatgataagtcacggtggtcacttaatgtaatgacattgtctaaacctgctgaagcgcaccatcttttttgtgcgaatggtaagtctgctgagattgtaagcacaatcccctcttctttagaagcttcagagttgaatttgcgagtctgctgatcacaaacacctgtatcaattgatggtaccacactaattaatttctttttaccagcataatctgctaatgttacttgatttaagtcattatctaacactgtaaaatcagatgcaaaatcaccttcattaatttgttgaccttttaagtggattggtccacctttgaatgttatttcagtcatatacttgacctcctgcattttaaaattctaactacatcatacgacaatttatggtttgattacaattttcatgctttaatcaaaagcaaatttaattttatacaaattgttgaatatgatcaaaagcattttttaaaattaaaatcgcagtaataataataaataatacttttacatagccaacaccttgtttgatagcaaaatgagccccagtatatgacccagcaatcatgcttgtagccataattaagcctattacataatctacttgtcctaataccataaataatacaagcgcacctatattagaagcaaagttcaaaactttagcatttcctgcagcacttaaaaaatcaaaaccaaagactaacaatacaaaaagcataaatgaacctgttcccccacctacaaatccatcataaaagccgattaatataaaaagtgctgcaaatagtatggctttcttaaatgtaaattgagtaaacgtacgtgtattgccccaatcttttttaagtaatgtgaatataaacaccgacgaaagtgcaataatgattaaaggtttcaatatttgtgacggaaccatcgttgcaatatatgctccacatgcagatgccaaaaatacaaaaccaaataatttggcaacaacatataagtccactttaccggaccttataaactttatcgtactagttaaagaaccaaatgaacttgccaatttgtttgtacctaaagccacagatggtggtagaccgattgctaataatgctggcgtagaaattaaaccgccaccccctacaaccgaatctataaacgccgcgataaaaccaaataaaattatgattataatcatcgttaaattcaaatccatagtttaacatccccttatgtttaaatttactctaggattttatttataaaaagtcgtttattaattggtttgtttgctgttctttaatagttttataatcacttgttatttcaagtgtttcaatattttcaacagcacgattaatcatctcttcaaaatcaaagacactttcatattgaactaccttttcaaagtttggttcggttactggatttttaggggtgaaaattgtacaacaatcttcaaaaggttgaatagatgtttcaaatgtaccaatttctttcgatttaataataatttcttctttatcgtaagttaataaagggcgtaatacaggggtagacgttacattattaattgcatacatgctatgaagtgtttgacttgctacctgccctaggttttcaccatttacaatagctaaagcccctatttgatgtactaatttatcagcaacacgcatcatcatacgtctcgttgaagtcattgtatatcttggatgtacaactttatttacctgtttttgcaattctgtaaatggtacaatatgcaatttaattggtccaacacgttcagctaaaatacgtgtcaattcaataactttttcttttgcttgatcacttgtaaatggtggactatggaaatgaatcgcttcaattgttacaccacgtctcatcacttccatcccagcaactggtgagtctatgcctcctgaaagcattagcaacgttttaccacctgtacctactggtaaaccaccagcaccagctaccacttcttcatacatataaattgcatctaatctaacttctactctaatttcatgatctggtcgtttaacattcactgaaatattgtcgaagtgcttcaatactgcaccacccaattcacgttgtaattcatacgtatccattgggaaatttttatcggcacgcttcacatcaattttaaatgtgctgttttcttcaaattgctgcgcaaatttaattgccgctgcactcattgcctctaatgttttttctacttttaataccggactaatagatttgataccgaaaatttttgataatcgatatgttatttcatttatatctgcatggtcttcaagttcaatatacatacgatctcgtttgcctttaacgacaaacccatcaagtccttttaatgacttatttacattatttcttaattgatttacaaatttctttctatttgaaccctttaatgttaactccccgtatctaacaagcaagtgatcatacttcattattttagcaactccttaatttcctcataaatgatgataaatatttctttaaaccttgctatatcttctttggttgtagtagccccaaatgataatcttatactaccttcaatagacttgtctgataatcccattgcagccaatacttcatttaatttattacgtttagatgaacaagcacttgttgtagaaatcataatatcgtattttgaaaatgcattaactaatacttcaccttttacaccaggaaaactaatgtttaaaacgaatggtgaacctgaagttgaagaattaatataaactccatgatatttatttaaaaattgacggacgtcattatttaactcagtaacaaatgcattcaatgcttcaaggttttcacttgccattttcatcgctttaaccatagcaatatcatttggcaaattaactgttccacttctaacgccatattcttgaccgccaccttgaatgattggctcaatattttgaatatgattaacaagtaagacgccttgaccttttaacccattaaatttgtggccacttaaactcacgctatctacatttgttaaatccatagctactttaccaaacgcttgaaccgcatctacatgaaaatgtgctttaggataattttttaacgtttcagccatctttggaatgggttgaatttgacctgtcacattatttacatacatacatgttactaaaccgactttatcggacattaaatcgttaaaatgttgcaaatcaatcgtgccatcttttgttacatcaacatatttaactttaaagccttcgcgctcttccaaatatctgacaacttctaaaacagacggatgttctaaaacagatgtaattatttctcttgctgtatcaaatttacgataagccacacctttaagcgcgatattgttagattccgttgcaccactagtgaaaacaacatcatatgtcatattagtattgaccataccatttatttgagcttttgcttgctgtaataattgatctgcttgcaaaccagctttatgcggactattaggattaacatacattgattgatttactttcacataagtatccaacacttcatcaaatgctttcgtcgttgccgcattatctagatatatcaaaataaacacttctctttcattaatcatcaatcgttaaaattgttttactcaagcattatactattatccggcaaaaaataaaggttatagcgcaaaataatcttatttctacttattaaataagaattagactatttcactctatgcatacagctgtggaacgatgcattttcgctacctacattaattcaacgatcacattgaatgacatttatctttaaacgattgctaaattgattctccctatcatatatccatataaaaaaagaagctagacaacatacagttggctaactcctatcacttcgtaaaatacgattaagtttaataaatgctattgcttaataacttcttcttcaatatgtttagtgacacctggctcaacactttcaagagcttgctctgcaatttcaatcgcacgcttatagcgattatttttaaataatcgttcagcttcatttaagctcttatcaacattgctatagtccttacgatatctatttccatattgaattaatttctctgcataaacagcattaacaagaacatcatttgcttcatcttcaaatgtattcatttgaatcaaaattttagatactttatcttttaactgtttaacgtgtattggacgttcactaaattgttcgttaacatcacgaacttcatgatcaatttcatttttcatgatgataaatctttcaggaacacttgttaagttagaagcaagtaatcgacgatacacttcttctttcttcgattgtactcgtaacagattgtcttctgcttctgcttcatcttcacgtaattgaatcagatgattttgtagcttttcttgtttgtcattaatgactgtgacatgatcttctaaatattgtaaattatcctgaacctcgctatatcgtacagcagatttagacatttcttttaaaatatcatcatatacagaaattaaactttgaatttcattttcaaattgacgaacactttgagcatcagattcatttatatagtagttttcacgtacatattcaatttctgtttgcaatgtataattcatgtctttagctttgaataagttatccgtaatgatatcttttgtttcttcgacatcatttttagctttaacttcatgttcaattaaatcatacatgtcatctaacttatcattgatattagctagcttatcattagcttcttctaattctaagcggctaattaatggctcaacgaaactaagctctgtttttaagctttgtaatgtactgtctacttttacgtgatccagatcatacccttcaactttaagatcacggcaaccatattttaaatcttggaattgaccaggtaattctttttgagtttctctaattaattctggtatttcttccatataagatcttagctgtttcatttgttcattcaaggcagctatatggttgtgcgcttgtacataattaccatcagcttttagtacttcatattgctctaaccttggctcgaatttttcaatttcagtttcaagaagacttgctgcctcaccaaattgatgacgatttgctaaaacatcacgtttcatttcacgataatcaaccttacatttgtcatataattcatcattatctttgtataacgcaataatttcatttacatcttctaattgttgctgatagctttgttcgtaactatccatcaactcatttgcatcatcaatttcactttgagatgcgttgaaactaaatttatctaataaagcctcagcattatggattttttcttccacaggagctagatacttatttgtactttctacgttgtcctttttcattgcatcgtatttcgtttttgtttcaccttttaaattcaacttagataattgtgcaaggttttgatcaaaaggtaacgtctcaatttcatttttacgttcgattgctttttcaataatttgtcgtttatttgaacgtaaatagaataatacacctacagcaatcaatataatcacaattattgccaaaatgatatataacaccatatgcttctcctcctaatttatcattactattataacgtaattttgcttaaggataaattataaaatgaatttattgccataatattttcgaaattctatactattataaaatctatgaaaataagaggttttaaatatgacaacaattaacccaacaaactacacattattaaagaaacaagcagcaagccttattgaagatgaacatcacatgattgctattttaagtaacatgtctgccttattaaatgataatctagatcaaattaattgggtcggcttttacttattggaacaaaatgaacttatacttggacctttccaaggacacccagcttgtgtccacattccaattggaaaaggtgtatgtggtacagccgtttcagaacgtcgtacacaagttgtagctgatgtccatcaattcgcaggacatatcgcttgtgatgctaatagtaagtctgaaattgtcgttccaattttcaaagatgataaaattatcggtgtcttagatatcgatgcccctataacggatcgatttgatgacaatgacaaggaacatcttgaagcaattgttaaaattattgaaaagcaactcgcataaaaggacatcagcattttcaataaagtgttgacagttagcaggaaaatgttacaataaactttgtgtgaattaacgaaagtagcagttgtatattattgagcgctatgttgttcccaatgcggacgtgtcacgtaactgtcgctataaggtgaagacacataaaacaatatatcttagtaagcatgcaacactcttttttgtttattcataacaacaaaaaagaattaaaggaggagtcttattatggctcgattcagaggttcaaactggaaaaaatctcgtcgtttaggtatctctttaagcggtactggtaaagaattagaaaaacgtccttacgcaccaggacaacatggtccaaaccaacgtaaaaaattatcagaatatggtttacaattacgtgaaaaacaaaaattacgttacttatatggaatgactgaaagacaattccgtaacacatttgacatcgctggtaaaaaattcggtgtacacggtgaaaacttcatgatcttattagcaagtcgtttagacgctgttgtttattcattaggtttagctcgtactcgtcgtcaagcacgtcaattagttaaccacggtcatatcttagtagatggtaaacgtgttgatattccatcttattctgttaaacctggtcaaacaatttcagttcgtgaaaaatctcaaaaattaaacatcatcgttgaatcagttgaaatcaacaatttcgtacctgagtacttaaactttgatgctgacagcctaactggtactttcgtacgtttaccagaacgtagcgaattacctgctgaaattaacgaacaattaatcgttgagtactactcaagataataccgttcaatacaaacacccacaattgtgggtgtttttttattaatttaaaaatgatagattcaagattatatggagctcccctattttacaatcaacttagaatttacaagtcttatttgttgaataatctataatatttcatcattagtttttaaaattatcaattgcgatatacgaaacctcatccctctatcaaattaccattcatcgtctcacttaataaataatttcggattatctgtaattaatccatctacacccatttgtcttaatttttctccagttttcaatttattaactgtgtatggcataacctgtaattgatgatgatgtgcttcatcaacaaattttctggtcactaatgcataattaggattaacataactagcaatttgagcaattcttgaaaagtttggctttttataccaatacttacgtttactacaaagcacacctaattcatatatactgcctaatgtgtttaacttttcgatgcattcgatatcaaaagattgtataactacttgtgtcgcatcgactttcttttcttccaaaaatgccagcaatttacattctattcctggatataaattcggacttttcaattcgatcaatagctttttatcaaactttaagcataatgaaagtacttcatctaacgtgggtattcgttctcccttaaaagcaacatctttataactaccaaaatcaaatgattttaattgcgataatgtgtaatcagcaatacgccccttaccatccgatgttctatcaattgtttcatcatgtatcacaacaaaatgttggtctttggtcaaatgaacatctatttctaacatagcaacattgagtcccattacctctcgataaccgaccattgtattttcaggaaaatcactcggcaatccgcggtgcgaaacaatttgtaattcatctttcagtttattcagagtcattgataagtcacctttctgttaaactttgataaactattctaaaattaaactatcacaattatattggaggttaaagcaattgcatcaacatgactttaaagtccaaacttcttggcaaggtggtcgtaacaatgtcggaaacgttcaaggcgacatactttcagagaatatttcaatacctgcttctttaggtggtgttggtataggaacaaatcccgatgaaatgttagtatcagccgcttcatcatgttatatcatctcattagcagctactcttgaacgtgcaaagttcacagatatttcaattgaacaacaatcgattggaacagcttgtttaaataatggaaaattcagtatgtcaaaaattgtgcaccatcctcacattgaaattccaagtgatcaaatagcacaattagaaaagcgattaccaaaattgataacaattgcagataataattgcatgatttcaaatgctgtaagaaataatgtggacataaaaatctatcccatcattcaggccaaataaaatcgttaagtgataacatttgttcgacaatatagcgttatcactttttttaggcttttaaattttcagaaaatttgctaaaatagtgaaatcttatttataggaggcatataaatgtattatcatcaaccgttgttattaacacctggcccaacccctgtacctgatgccattatgagagaaattcaagcacctatggttggtcatcgctctaaagattttgaagacatcgcacaacaagcatttcaaggtctaaagccaatatttgggagtcaaaatgatgtacttattttaacatctagcggtacaagcgtcttagaagctagtatgttgaacattgtaaaccctgaagatcacttcattgtcattgtttcaggtgcctttggtaaccgatttaaacaaattgcacaaacttattacaaaaatgtgcatatttatgacgtaacatggggagaagctgtagatgtcaaagatttcatcaattacctttcaactttaaatgttgaagttaaagcagtatttagtcaatattgcgaaacatctacgacagtgctacaccctattcacgagttaggaaatgccatcaatcaatttaatagtaatatttattttgtagttgacggcgtaagttgcattggtgctgttgatgttgacattaacaaagataaaattgatgtacttgtttctggtagtcaaaaagcaattatgttacctccaggattagcttttgtagcttatagccaccgtgcaaaagaacgtttcaaagaagtaactacaccaaaattttatctagacttaaataaatacatttcgtcacaagctgacaattctacaccgttcacaccaaatgtgtctttatttagaggtgtaaatgcatacgttgaaaccgtaaaagcagaaggtttcaatcacgtaatagcacgacactacgcaattagaaatgcattaagaagcgccttaaaagcattagatttaactttattagtcaatgataaagatgcatctccaacggttacggcattcaaacctaacacaaatgatgaagtgaaaataatcaaagatgagcttaaaaatcgctttaaaataacaattgctggtggtcaaggccatcttaaaggtcaaattttaagaattggtcatatggggaaaattagtcctttcgatattttatcggtagtttctgctttagaaattattttaactgaacaccgtaaagttaactatatcggtaaaggtatatcaaaatatatggaggttattcatgaagcaatttaatgtactcgttgcagatcctatatcaaaagatggtatcaaagcattattagatcacgaacaattcaatgtagatattcaaactggtttgtccgaagaagcattaatcaaaattataccttcataccatgctttaatcgttcgtagtcaaactacggttactgaaaatatcataaatgctgctgattctttaaaagtaatcgcacgcgccggtgttggtgtagataatattaatattgatgctgcaacattaaaaggtattttagttattaatgccccagatggtaatacgatttcagctactgaacattcactagcaatgttattatcaatggctcgaaatattccgcaagcacaccaatcacttacaaataaagaatggaatcgaaatgcatttaaaggtactgagctttatcataaaacattaggtgtcattggtgctggtagaattggtttaggtgttgctaaacgtgcgcaaagtttcggaatgaaaatactagcttttgacccttacttaacggatgaaaaagcaaaatctttaagcattacgaaggcaacagttgatgagattgcccaacattctgatttcgttacattgcatacaccactaacacctaaaacaaaaggcttaattaattctgacttttttgccaaagcaaaacctagtttgcaaataatcaatgtggcacgtggtggtattattgatgaaaaggcgctaataaaagcattagacgaaggacaaattagtcgggcagctatcgatgtgtttgaacatgaacctgcaactgattcgcctcttgttgcacatgataaaattattgttacacctcatttgggtgcttcaacagtcgaagctcaagaaaaagtggcaatttctgtttcaaatgaaatcatcgaaattttaattgatggtactgtaacgcatgcagtgaatgcacctaaaatggacttaagcaatatagatgatactgtaaaatcatttatcaatttaagccaaacagttggtgaattagctattcaattaatgtacaatgcaccaagctctattaaaattacgtacggtggcgacttagcctctattgatagtagtttattaacacgtacaattattactcatattttaaaagatgatcttggtcctgaagtcaatattatcaatgctctaatgctgttaaatcaacaacaagtgacattaaatattgaaaataataaagcagagacaggttttagtaactacttagaggtagaactatcaaacgatagcgattccgttaaagttggcgcttctgtctttacaggtttcggtccaagaattgttagaattaataatttttctgtagacttaaagccaaatcaatatcaaattgtgtcatatcataatgatactccaggtatggtaggtaaaactggcgcattgttaggtaaatacaatatcaacattgcatctatgactttaggtagaactgaagcgggcggagatgcgctaatgattttatccgttgatcaacctgtttcaaacaatataattgatgaacttaaacaagttggtgaatacaatcaaattttcacaactgaattgacggtacagtcataaacaatttatgtaaattcaaaatgccaagaagacattggattacttccattgcttcttggcattttttcattattaatttcattgtaactcaatatgaaacctttggttcaatcattcacttcaagttatgctgtcaaacaacaatcaaattacaaattatctagtacacctctaagttcacctaaatgattaataacatagtcggcatgatgcgcttctaactcacttgcagcacccttaccttttaaacctgttaatgttccaataaacgttgcacctattttttgagcacttaataagtcagctaacgaatcgcctactataaatacgtcatctttatttacaatgttatcttgcttattgatataagattcatatttatcgcgattattaccatataaagctgcgatataactaaaaggattcggctttcctaatggtcgtgcttgcggatacatattctctgcttctaaaacatcacttgctgttgcaataaaatcagcttcaaaatatggtaacaatcctaaattttcaaatggcacaacagtctcagtataaggacgacctgttgcaatacctaattcgaaaccagcaccttttaaatcattcagaagtaccttaacttcatctactggtctcaaaataatttcttgataaatataacctgtcttaaaagtagttcgtgctattttcttttcaacctcttcatacaacttcgatcctaaataccattcttgataaacttcttgcgctaacgtccataatgcacccttcaaactaaataaattagcatccgaaacatgtaactctgttgttgcaaactcttccaaagcagcataaatattatttttaccaacttttacattatccaaaaattgtaaaggtagttgttcatttaaattaaaacggtctgctaagtttgtgcttatattttgcaacttcaattcgacaggctcatcttgatacatgaatgcctcaatttcatcatgtgataactttttcaaaatatcaattaaatgaatactaaaaacgataaataacatatcccaatttgaattcagccctagcgattttaatttgtttaaaatcttatctttttgaaaaattcgattcctaatgtcttgtatatcgttatcagtcaaagtttcccaatctatatgtgaatgaagacctaaataacacttatccattaataattcatataccgttaatgcagagacatcgaaacaacgttcttcacttaaaaaaacgccatcaacatcaaataaaattttcttcacaatccccactccatttctgaaaattcagatataaatcattctactatttgactaaaaaaagcgcaaaccctattgaagttagatttgcgctttagttgattaaattttataaatgtttttcaatttcatcagcaacctgctgtacgtgtgtaccgacaataacttgagttgaatgtttgccattaacagtaacaccaactgcaccggcgtttttaatcttctgttgatcaataatagatgtgtcttttaactctagacgcaaccttgttgcacaattggttaaattaacaatattctcttgaccacctaaaccttctaatatttgtatagcatgattatgatatttactttgtttaatatcattttcaccaggagcaatattatcttttacaactgttggatcaactaattcattttcacctctaccaatcgtatttaagttaaatacttggatgactacacggaaaatcacatagtataagatgaagaatacaacaccttgaacaagcaacatcaatggatgatttgataccggattaattagtgataacacataatctatcaaacctgcactaaatgaaaatccagctgtccaatggaatgtagctgcgataaataaagataatcctgttaataacgcatgaacaacatataagattggcgcaacaaacataaatgcaaactcaatcggctctgtaacaccaacgaaaaatgctgcaactgaactcgctaggaaccaaccgtaaacttgttttttctgagtagttttagctgtatgatacattgctaacgcagccgctggaataccgaacatcatgattgggaagaatcccgcttgatagcgtcctgtaataccttttatagcatctttgccactttggaatttaccaatatcattaataccaatcgtatcaaaccagaacacactattcagtgcatgatgtaatcctgtaggaattaataatctgttggcaacaccatatacgaaagcaccaaatgatcctaaaccaactatagattcaccaaattttacaatccatgaataaagtagtggccataaaaataacaatatgacaactaaaaatgtacagtaaaatgcagtcataattggaactaaacgtttaccactaaaaaatgataatgctaatggtaattctgtttcactaaacttattgtatgcataagctgctattaaacctattacaatacctacaaagacattgccattattcatcttttcaaaagctgaatttatttcagaagctttcattcctaataaaggcgctaatttcattggtgataatacaactgtaactaaaaaatatcctaacgcagctgcaagcgcgactgcaccatcatttttctttgccattcctatagctacaccaattgcaaataaaatacctaattgctctaaaatcgtagtacctaccgtagtaaagaacattgcgattttcggcgccgcatgaagtgcatttaacgtattaccaattccggcaataattgctgcagccggtaaaatggcaactggtaacattaacgaacgccctaaattttggaaaaatttatacattgaatgtcatccttcttaaaataaggtagaaatataaagattactaatgtaactagaataactacttcgatactccgttatagtcacctaggcttactaaccagctatatttctacctcaagttattttataaactttttacaatttcatgcaattcttgttgtaactttgctgttcgtgtttcaatctcttttgtaatataatcgatacgctcgtttcgttttaaatctttaggtaaatcgttaatatcgattggtttaccgatatttatgtatgcttgtcctgttaaaagaccatgaatcttagtaggaccaacataagcaacaggtaatattggtgacttacttaacattgcaattgttgaagcaccacgtttcaaaggtgcaccttcttgcgatgtgcgagaacctgttgggaagataccaactgtcttattatctttcaacaaattgattgggcgttttaaagtactaggtcctggattttcacgatctacaggaaatgcatttaaagacgttaaaaatttaccaatccatttatttttgaataattcttttttagccatataatgaatttgattaggatataatgccatacctagcataatgacttcgttataactttcatgcgtacaagttacgacatatttactatccttaggaatattatctttaccgattacgtataatgattttgacattttaactaaaatgaaattcaaaatcttactaatcactgaatacattgtgccacctacttaacttatttgtttataacaactagattttatcactatatttttactagaacaagatagtctgaaaatacatctaaagttgtatagtgtattactagcaataattataaaaaaaagacataattaaagcatatataaatcatataatggaggttaagtatgtcagattttaatcatacagatcattctacaacaaaccatagccaaacacctagatacagaagacctaaatttccatggtttaaaacagtcatcgttgcattgattgctggaatcattggtgcacttctagtacttggtataggcaaagtattaaatagtacaattttaaataaagatggttcaactgtccagacaacaaataataaaggtggcaatcaattagacggtcaaagcaagaaattcggtaccgttcatgaaatgataaaatctgtctcccctacaattgttggagttattaacatgcaaaaagcatcaagtgtagacgacttattaaaaggcaaatcatctaaaccatctgaagccggagtaggttcaggtgtcatctatcaaataaacaacaattcagcttatatcgttacaaacaatcatgttattgatggcgcaaatgaaattagagtccaattacataataaaaaacaagttaaagcgaaattagttggtaaagatgcagtaactgatattgctgtacttaaaattgaaaatacaaaaggtattaaagcgattcaattcgccaactcttcaaaagtacaaactggtgatagcgtattcgcaatgggtaacccattaggattacaatttgctaactctgtaacatctggtatcatttcagcaagtgaacgtactattgacgctgagacaactggtggcaatacaaaagtcagcgttcttcaaacagatgctgctattaacccaggtaactcaggtggcgcattagtagatattaatggtaatttagttggtattaactcaatgaaaattgctgcgacacaagttgaaggtatcgggtttgccattccaagtaatgaagttaaagtaacaattgaacaacttgtaaaacatggtaaaattgaccgcccttcgattggtattggtttaattaatttgaaagatattcctgaagaagagcgcgagcaacttcatactgatagcgaagacggtatttatgtcgcaaaagctgatagtgatattgatcttaaaaaaggtgatattattacagaaattgatggcaagaaaattaaagatgatgttgatttaagaagctatttatatgaaaataaaaaacctggtgaatcagtcactgttaccgttatccgtgatggtaaaacaaaagaagttaaagtgaaattaaaacaacaaaaagaacaaccaaaacgtcaaagccgatcagagcgtcaatcacctggccaaggcgatagagatttctttagataatttacagacagaaaagtacattaagagcctactcatattcattcctaagaatgtaatgagtaggctctaatttatttagctatgcaattatatttattgatagttaaccatgaagtattttttcttaccgcgacgaataatcgtaaattcgccatcaattttatcttctggtgctaaagcataactaacatcttgttgtctctcaccattaatataaatcgcaccattgttaacatcttcacgtgcttgtcgtttagaaggagaaatgcctgtttcaataaggacttcaacgatatttgttgtgttatttgataatgtcacttgaggcacatctttaaatccatcttttaattctttcgctgataatgattttaaatcaccactaaataatgcttgtgaaatacggatagcatcatttaatgcatcttcaccatgaataaatttagttacttcttcagctaatgttttttgagcttcacgtaaatgcggtgcttcatttttagattgttctaagcgatcaatttcttcttttcctaagaaagtaaagtattttaagaatttaattacatcttcgtctgattgattaatccagaattgataaaattcataaggacttgttttttcagcatctaaccaaacagcacctgactcagatttaccaaatttcttaccatctgatttagttacaagcggaatagttaaaccgtatgcgtctgtttgaccatacatacgacgcattaattcaataccacttgtgatattaccccattgatctgatccacctacttgaatcttacaattcaattctctattcaaatgaccgaaatcaatagcttgtaaaatcgtgtatgtaaattctgtatatgaaataccatgttctaaacgactttggattgaatctttacctaacatgtaattaacaccgacgtgtttaccatagtcacgtaaaaagctaattaatgaaatttgtcctaaccagtctctattattaacaagcactgcaccatggtctgttccaaattcaaaaatattatgcatttgcttactaataccttcgatatttttatctacttgttcttctgtttgtagcacacgttcttctgatttacccgatggatcaccaatcatacctgtaccaccgccaattaaaacgataggacgatgtccatgttcttgaaatcttcttaatgttaaaaatggtagtaagtgaccaatgtgtaagctatctgccgttggatcagcaccgcagtataacgtcacttgttctttatttaataaatcttcaataccttgttcatcagtttgttgataaataagacctctccattttaaatcttcaattaatacattcgtcattattatttcctcctatttataattatttagtgaatacttgttaaaatactttaaagctttttgaacgtaaaaaaacccttacaacaaatatgtaagggcgcgattgcacgttaccaccaaacttaaacataatcataagataatgttcactctattaatgatacgttcattaataaacgtaggacatgttagttataaaggtgtattcatattattaaaaacactagttcacagcgaccactagctctctgatgatttcaaataatattacttgtccttttatcctattctttatgcattttccctaattataattaacgttaaaataaaagtcaaattgcttaaatatggtatactatacgtaatttaggaggttaaagatgacgaatcaagacaacaatcatcaattgaatcatcgtatatatcattttgaaaagatatataaagctatcaaacatgtcattgtttttatatttatgattttcattgccatcgttgctatcgctgtgattgcgatgtctttatattttcatcatttaactaaaacgtccgactcattatcagatgatgctttaataaaaaaagttcgacaaatacctggcgatgaattattagatcataataacaaaaatttgttatatgagtataaccattctcaaaactcactcattataggccctaaaacatcaagcccaaatgtcattaaagcattaacgtcatctgaagacactttattttataaacatgatggcatcttaccaaaggcgattttaagagcaatgatacaagatatttttaatactaatcaaagttcaggtggtagcacaattacacaacaacttgttaaaaatcaagttcttaccaacgaaaaaacatatagtagaaaagcaaatgaacttcgcctagcaattagattagaacacctactctcaaaagatgaaattatatatacatatttaaatatagttcccttcggtagagattataatggcgctaatatttccggaattgcatccgcttcatatagtttatttggtattccaccaaaagatttatcaattgcacaatctgcataccttatcggtttgttgcaaagcccatatggctatacaccctacgaaaaagatggaacgttaaaatcagataaagatttgaaatatagtattcaaagacaacattatgtattaaagcgtatgttaatcgaagatcaaatcactgaaaaagaatacaacgacgcattaaaatatgatattaaatcacatttgttaaatcgaaaaaagcgttaattgatgttcactttttaaagtaaccacaacaatgcatccagatattaaaaacagcagtaagattattttcaattagaaaatttctcactgctgttctttattttaaatactctaaaggaaagccattaaaccaatcaatagtttataatttaattgctttcacattgtctacaaagttaatcatacatatgctatatccagttaattatttagattcttttctgaatttaggaatgaataaagctaacatacctagtaacgcatataagccccaccatgattggcttgaagttgtttctccagtttttggtagcattttagattgactaagtttgttttctttcgatggtgtgccggccttttcttttgttttcactgttttgtctacagttttatgaatatcattcgatggatgttcggttgtttttttgtaagtaactttgtctgtattattataattttgtctcacaccatcaagctttgctgcttttccagtatgatttttatcggcaatatgagcaagctgtatgactttgtctttatttttattagagtctttatcagtatcgacattagatgacataccaacgctattatcaacacccttatcagtgtctttagcaatttgagtatccatttcttttaaatcatacttatcgaagtgagtgttacccgacatatcggataaatgatcaacatcatgatgcgcatctttgtcaacactactatcagtatctttaaccatgtcagactctggttctatcaaatctactttatcagttgcctcacttggagttgtttcaatactgttatttgtagctgtatccgttgcagtaacattatcttcttgtcctgtttgtacatttagcggttcactcgtgttattttgtgatgtgtcatcatcttgtgtcttgatatcctgatttataattctgacatgatattgaccttcataaccaatgtttgccacaactactttaacaatcgcattgtaaactgctttgtcaggtatatatgggaaaatcaacgttctagaattatttttagtatctttagaaacagttgtgacacgtttaccttctacaattaaatctttccagtaactgtcatcctttgttttcatcactacatatttttgaccatttaaagttgctgtatagaatggatgttcaacaaatccatccatgactgactcactattttcttcactttcaaaaacaacaaaatgagcctcttgtacatctgttaattgatcattagtaggtgtaacattttcaaattctgtcactgcagacttaacttgatcggctaactcaactctcgtttggtctaatttctttttatattctgctttatatttttccggcaatttctcttgtaatttttctaattcataaacttgtctttctaacgttttggctttgtgatacggagctaataatttttgtaaattgtatgtttcctcatccacatagtcgtctgggttattagtaataggctgtgcaaagaccattagcgtataatcatagtcttcatggatgttctcaccatattcaatagatgacacaattttaacttctctcgtaccattagatactgggaaacgaatataggcataatctttatcagaatcatatgatactaattcgactggtaactttttgtcaccttcataaacttcaaatttcttccatgttgaagctgtctttaaacctaattcaattattggtcctgtttttgtaaaaatgacagttgctggttcaacagtactagcataatgatagaactgtctttcacctttatcatttttcatttgaaaatcaattggtcgccaattatcagctgtatgttctttatcgatgatagccgggtttttaattgcatcttgtagcgattcatctgctggtggatactgttgattaacatccgactgattacttgactcattcgttttatcgttagtattaccattagaatttgtttcatgagctggttggcttgacgcttgatctgcattcgcagacgattttggttgtgcaggttgactcatatcggtcgttgcctgcggttgattattagcattgttggtcgttgatgtattttgattagatgtattcgtatttgtttgattacttgcatctgaacttgattgatcattcgttgctaatgcatcatttgtatctgattttacaagtgaaggatcgttataaataggtttagcaaatactaatttagtataatcataatttgtttcaggttcatcatcaatttgagttgaagagacaattttcagctcttgcgtaccatctgaaacagggaatcgaatataggcatggtcttctggaacaggactatacgatacaagtctcactggcaatttttgattgttttcatagacttcaaacttcttccatgttgaagcagtattgatgtctaattcaacctctgctttctttttagtgtaatatacatctgctggatctttgatactgaaaaagtgatagtactgcgtttcattgtttttatctaataattgaaaattaacttgttctcttggaccaatatcatgttctttattttctactgcaggatttttaattgcatctttaagtgattcatccgctgcaggataggttttcgcagtgtttgctggttgagtagcaggttgtgtttgatttgtatcctttggtggctgagttgtagttgcattattattttgattttccgagattttatctgaagtatttgtattttctgctgcttgcgcttgatgttgagaagtaattaaaaatagtgtactgacaatgaccgatgcaacgcctagagttgattttctaatagaatagaaagaccttaattttgggtgatgtttgttcatgttgttaacaactcctataagatagtatttaattgataataattatcaatatcaattattagtgttaattgtagcgcatcccaattaaatattgcaacctattttatcaaatttttttaatatgaatattcattgtatcgctttcctattcttcaagcccactttttatcttcgaacacattaattaactaccttcaaacattgccgttagatttgccaaattgaatctatttttagcacagcaaaaaaccgaactgctgaaataatgcatctccaacagtccggtctattaaactatttacttatctttattaaacaattgccatgatatattagaataacccaattgcatgaccatcgtcagtaacatccatgtttaatgctgctggttttttaggtaaaccaggcatagtcatgatcgcacctgtcaatgctacgataaatcctgcacctgttttcgcttctaattcacgaattgtaatttcaaatcctgatggtgcacctaacaacgtttgatcatctgagaatgaatattgtgttttcgccatacatactgggtaattatcccaaccattttctttaaattgttttaattgtttttgcgctttactgctaaacgttacttttgaaccaccatagatttcagtcacaatcttttcaatcttttgctctaatggtaattctaattcatataaaggtttaaatgaattaggttgatcaatgacttctaatacttcatttgctaagtcaacgccacctttaccacctttttcccaaacttcagttaaggcaattcgtacgttattttctttagcccaagattttacatattctacttctgcatcggtatcatgtataaatgcattaattgcaacaaccggttctacaccgaattttttaatattattaacatgacgctctaaattaacaattcctgcttttactgcttctacattttcttcttttaaattatcttttgctacaccaccatgcatttttaatgcacgaatcgttgctacaactacaactgctgctgggtcgaatccagcttcacgtgccttaatgtccatgaatttttcagcgcctaagtctgaaccaaatccagcttccgttacaacgatatcagctaaatcacgtgctgtttcagttgctaaaattgagttacaaccgtgtgcgatattcgcaaatggtccaccatgaactaatgctggtgtcccttcaattgattgtactaagtttggtttaattgcatcttttaaaatcattgcaagtgcaccttgcacttttaaatctgcaactgtaactggcttgcgatctctagtgtaaccaatagtaatacgactaattttatcttttaagtctttaatacttctacttaaacataaaatcgccataatttcagacgctactgtaatattaaagccatcttcacgtggtacaccatttgtaggtccacctaacccaacgtttacatgtctaagtgcacgatcattcatatctaatacacgtttccattcaatacgtctttgatcgattcctaattcattaccttggtgaatatgattatctataaacgcagacaatgcattattagcagttgtaatcgcatggaaatccccattaaaatgtaagttgatatcttccattggtaagacttgcgcataaccaccaccagttgcgccacctttaataccgaaagttggtcctaaggcaggttcacgtaacgctaccataacattcttcttcaactcatgaaatgcgtcagctaaaccaacagtaactgttgatttaccttcacctgctggtgttggactcatcgcagttactaaaacaactttccctttgctatctcttggcgtaattttattaatgtcgattttagctttgtaatgaccataaggttctaatgcatcctctgaaatgcctaccgatgcagcaatatccttaattggttgtagtgttgattgattcgcaatatctaaatctgataaatgagtcaacttttttcgcccctttttgtttaatttatgcattttaaatatgtaagttgtagctaagaaatttttacttacattcatataataacgaactgttaaaaacttgtcgactaaatcgggttagcgctttcatttttgcaataaattcacttattaaagttttgtattatacaacttttagcgcttgatactattgataactatatttttctattatttaaaatagtcatctttcaaaggtcatattaaaaataaaaagcaatataaagatataccattattgttatgtcatcattttcaaatgctttctacgaaatgatatgacacaagttaacagctctttatattgcttatcataaagtaaactaatatttaaacattaacatgaaatatgttgtctccctttattcttcgaaagaaatcttcaataacattcatgtcattattccattgtacttaaatcccctgcatctaaatttaattcccaagcttttaatacacgtctcataattttacctgagcgtgttttaggtaatttatctttaaattcgatttcacgtggtgctgcatgtgccgacaaaccttctttaacaaataaacgaatttcttcttttaattcgtctgttggttcatatccttttctcagtgcaacaaacgccttaattatttcaccgcgaaccggatcaggtttaccaataattcctgcttcggcaactgcttcgtgttcaaccaatttagactcaacctcaaatggtccaactcgttcaccagctgtcataattacatcatcaacacgtccttggaaccagaagtaaccatcttcatctttatatgccgaatcaccagatacataccagtctccaataaaatatgacttatatttttctggattcttccagatacgatacatcattgatggccagcctttttttatagcaaggttgcccattcgatttggtggtaattcattacctgcatcatcgataattgcagcttgaataccaggtaatggtttgcccattgagccaagcttgacgtccatcgttggatagttaacaatcatatgtccacctgtttctgtcatccaccaagtatctaacaccgttaaaccgtatacttttttcgcccattttataacttcaggatttaaaggctcacctactgatagaatcgaacgtaacgatgacaagtcatatttctcaacaatatcgtcaccagcactcattaacattcttaaagctgttggtgccgtataccaaatcgtcactttaaaatcttcaatcatactataccactgttctggtgaaaagcgaccaccagctatacaatttgtagcgccatttaaccatggtgcaaaaataccataagatgttcctgtaacccaacctggatctgctgtacaccaataaacatcatcttcttgtaaatctaatacatattttccagaaatataatgcactaacattgcttgttgaacatgcaatacacctttaggttgcccagtagaacctgatgtataatgtaaaatcaaaccatcatccgactttaaccattcaatgtcaaattcatcgctagcagtttccatcaaactaataaagtctatgtaattgtcttctacattctcatctacaacaacaatttttttcaagttcggtaatttatctacaggtactcgaggtaacaatgccttattagtaattaacactttagcttcactgttctctaatctatccgcaactgccttttccataaatgcttcaaataacggcccaacaattgcaccaatttttaaaacacctaacaacgcaaaatatagttcaggtgtacgcgacataaatataaatactctgtcacctttgtcaacttctgcatgttcagacaaaacattcgctgctttattagataaccgttgcatatctttataagtatacgattcttttctgtgctcatctttgtaatttaacgctattttatcccctgatccttgatctacatggcgatctatacattcatatgccatgttcatttttccagtttcactccaagaaaatgcttgttctacgtctttccaatcaaaagtattatatgtttcttcataatctttaagattatgtttgccttgcgctcctttatatacttcgactttcatttgaaactccccctttgttatgtgaaaacgctttctttctcaatattatacataacatttctaattattcaaaatttttacttttatcctttttctagtattaattattgtaaattttctatataatgaatttaatacaatcacgacgtcgattgaggagttgaaaatatgaatcatttaaagacgtatcaatccgaagattattacattcatgacaagcaatttgttattgaaggtcctttaacacacgaagatttgaaagcgcttactttcgatgcgcatttaaccgcatttagagacgctgaagatcagtatgaagctttgttagaaattacaacattaccagaaggtagaatttatgttgctcgccaagatcaactcattgtgggttatgtcactttccactatcctgatgaaattgagcgctggtctacaggtaaccttccatatttaatcgaattgggggcaattgaagtcagcatcaattttaggcaattacaacttgcagaaaagctgatacaacttagcctttctgcaccagaattcgaggattatatcgttataactacagagtattactggcattgggatttaaaaaattcaaagttagatgtatttgactataaaaaattaatgcagcggttaatggcaactggtggacttgaaatattcgctacagatgatccagaaataacaagtcatccagctaattgtttaatggcaagaattggcaaaaatattacattagaacagcaacaagcgtttgatgatattcgttatatgaatcggtttttcttttaatttttggaatatcggagggattatatgcaacaacatttatcaaaaactgcatatgtttattcagataagttattacaatatcgatttcatgaccaacatcccttcaatcaaatgcgtttaaaattaacaacagagctacttttgaatgcaaatttattgtctccagaacaaatagtacaacctagaattgcaacagatgacgaattaatgttaattcataaatatgattacgtcgaagctattaagcatgcttcacatggcattatcagtgaagatgaggctaagaaatatggattaaatgatgaagagaatggtcaatttaagcatatgcaccgccatagtgccacaattgttggaggcgctttaactttagcagatcttattatgtcaggcaaagtattaaatggttgtcacttaggtggaggtttgcatcacgctcaacctggtcgagcaagtggtttttgtatatacaatgatattgcaattaccgcacaatacttagctaaagaatacaaccaacgcgttttaatcatagataccgatgcacatcatggagatggtacacaatggagtttctatgccgataaccatgttactaattattctatccatgaaaccggaaaatttcttttcccaggctctggtcactatactgagcgcggtgaagatatcggctatggacacactattaatgtcccacttgaaccgtatacagaagatgcatcatttttggagtgttttaaattaacagttgagcctgtcgtaaagagttttaaacctgatattattctaagcgtaaatggtgtcgatatacattatcgtgatccactaactcatctaaattgtacgttacattcattatatgaaattccatattttgtaaaatatttagctgatacttatacgaatggaaaggtaattatgtttggtggcggaggctacaatatttggagagtcgtaccacgtgcatggagtcatgtattcttaagtttaattgatcaaccaattcaaagtggttatttaccgttagaatggattaataaatggaaacattattcatctgaattattacctaaaagatgggaagatcgtttaaatgattatacctatgtcccccgcacaaaagaaattagtgaaaaaaataaaaaattagctttacatatagcgagttggtacgaatctactcgtcaataagtcacctaatctgcaacgattttaaaagataaataaaaggcattcttccaatacccgtataagtcgggtcgttagatgaatgcctaattttgtgaatttattttgtagttcctcggtattcaattctgtgtggtaaaactacatttggttcttctatcttttcatcgttcatatattttgttaataagcgcatccctactgcaccgatatcatataatggttgaataacactagaaagttgtggtctaaccatctcaactaagcgtgtattattgaaactaataatttgtaattcctctggaactttaataccagcatccattgcactatgcatgataccaatagcttcttcgtcactgatacataatatagcatctggaagattacctttcattttagcaaaagcttttacgccttctttataactttcagcaccagaacaattcaatgtatcacctaattgaaggccatttttatttaacacttcagttaaacctgctaaaacatcttcttgagcttttttagaatgttctccacctactaaagcaaatgatttagcgcctttttcaattaattctcccgtaatttctttcgcagcttcagtaaaatcaatattaacagatgctatatgtgcatccttaccatttgttcctgatactactacaggtacagatgattgatttatcaattctttcatttcttcagtaattgtaccaccaaggaaaataataccatcaacttgtttacttaataagttattaaaaatttctttttccttttcaggatcgttatctgaatttgaaataattgagtgatatttatacattgttgcaatatcttcaagtccacgagcaagttgtgaataatagatattagatatatctggaatgatcacacctactgttgttgtctttttactagctaaacctctagcaacagcatttggacgataattcaaacgcttaatgacttcgttaactttatttttagtttctgctttaacattttggttcccattaacaacacgcgacactgtggccatagagacacgcgcttctcttgctacatcatatatagtaactgtcataatttcctccttgtaaacgttttattcattataataacatgttttcatttcattttcatagtttaccatattttaatttacagtaacatatttttgtttggaaaaatttagcgaaaagcttgaaataaaaacaaccgctaaatgataacgaacgatatattttaattttatataaacttttttcatttttaattgtaatattttgagaaagccttttcaaatatcaattacatttgttgaaaaatgttcacatttcagtaacaaatgtgtgaatctattatatttacagataattcatagtcatacttttaattactgctatcagtcatagtctttaataattgtgaaattggataagtgtcgaaatattataacaatcgttaagtgtagtatagcctttatttctatacaaaaaataatagccactctaaaagtaatatactcttagaatggctactagtttaaaattgtcgattcaaagataatattctacttcaacatgacatattagttaagtagtctatagtttccttggaatattattttaactttttagcgttatataaatcagctaaaggctttaattcatcataaaatgtttggaattcatctaaatccatttgttgacccgcatcactaagtgcaacagatggatctggatgcacctcagccataacaccatcagcacctactgctaatgctgctttcgcagttggtaacatgatatctttacgacctgtactatgcgtaacatctaccatgactggtaagtgtgtaccttgttttaaaattggtactgctgaaatatctaaagtgttacgtgtcgccttttcataagttcggattccacgttcacataaaataatgttttgattaccttgtgaagcaatgtattcagctgcataaacaaactcttcgattgtagcagataaaccacgttttaatagaataggctttttcgtacgcccagcttcttttaataactcaaagttttgcatattacgtgcaccaatttggaatacatctaaatattcgtcggctacttcaaaatcattaggatttacaatttcactaactacatttaaatcgtatttatctttaatctgtttaagtattttaagtccttcaacacctaggccttggaagtcataaggcgatgtacgtggtttaaaagcaccgccacgaataaacttttcacctttggcatgtaaatttttagctaccgcttctacttgttcaaatgattcaacagagcatggcccaaatacaaatgatttattgccgtctccaataatgcccccattatcaaatgtcacaatcgtatcttcaggtttcaacttacgtgatacatataaatgtttttcattttcagatttttgtaaatctgtagaggctttaaaaatttctttaaataattgcttaattgtattatcgttaaatggtcctttgttgctatcaattaagtcgttaagcatttctttttcgcgttgtggatcatagatacgtgtaccttgttttaatttttcttcaccaattttttgagctaactcgccacgtttagacaataaatctaaaatttgatgattaagtgatacaatctcacttctgtatgattctaatttattactcatccttactcacctctactaattatttcaagtatattccactttaaagcaataaaatataatgttaaaaaatattctaacaatatcatatgtatagttcaaccctaaattgacagaaaataatcaattttctaactatatgattcaagactaccattttatgttttttttggcttttgttggacaatttttattctattttgatattaaatacccaatgatgattgatttaatttgtgttaccattatagcttattttgaatagacatttatgcttttaagaaaaattttcgtttctgatgtctattataaatctaaaaatctaatacttacaacctaacgcttaataaaaattaaaaacctttgtatattaatataaatctatagtgaacatcactcaccaacatattcggctatatttgaattagtgaacatcattgtaccttctaagattcattgtttatttgattatcgaatatttttccatcttcagcttaaaatgtgcaatatcactattataatctaacgatgttacaaacaacataaatacatggaatgatcgtgttgcctttcaaaataaactgatgatatcaaaaaaggtaagcacctgaatgcctaccttttattttgaaattcaatttttaaaaatataatacatagcttactgctatgattgataattaaacgattttagtattcttagtcattgaatgtacgtttctctattttacttttagctttttcaacttttgcatttgatttttttgatgcatttgatgatttagcatttgttgtttttgaattcttattactagtttgattattcttttgagttgacttacttgaactactttgtttctttgcaccttgtgatgatttcttattatgttgctttttctgacttgaagttttatttgtagatgcttttgatgcatttcgtttatttgaaggtgttgtttttttagattgtttacctgatttcttgtcaacagctgtattattagttgttttttcatcagctttacgtgtaataacaccattttcaaatttagcttctttttgtttaacagtgtccttattatctgtattaactgtctctgtctctgatacgtcattctttttagtaactaattgaggaatttctttcaagtcatttttagcaactggcttttctgcaaataacgcttcagttaattgactctcttttgaacctggtgttaatttagcttgcttctgttttgcagcgtttgctaatctttcagcttgtgactcttctttcgatacgtttaatgtcgatgcttttggttcttcatttgatacagctgcacttttatctgtttctgcttgtgcttcttttttagcttcttgaatctcttgtgcctcttgtgatgtatcacttaaattatttgcacttgcttcttcttttatcgctgcttgttgtgctttcaatgccactgcttttgattcttcatttgatacagctgcacttttatctgtttctccttgtgcttctcttttagcttcttgaatctcttgtgcttcttgtgatgtatcgcttaaattatttgcacttgcttcttcttttatcgctgcttgttgtgcttttaatgccgcttgctcatttttagatttgtttaaaaatccttcaacacgttcttttgtaaaggcaaccgtttcttcaagttgcgtttttctttcttcaaacttttgcgacagttcttgttctttgacttttaaatcatctgctttttgataaactttatttttaaaatacaagcctaaagctgaaccaacaagcgcgccagttataaaactaacaacaaaatctttacggttcggtagtgattcattttgataagtgtgtttattttttaatgttcttttattattttgttgctgcgtcatttgtatatcctcctataacaaatgcacttaaataagtaacaacctcatttaagtgcatttgtttaattattaattatttatctactcgagaagtatagctatgatttgcatcagttgctacattattagctttgtaatttgcacttccacgacggtagtgtctattttgccatttgtctgcaatttccattgcaacatttgaccattgaacaacttgtgagattttatcttcattttgagaaatattatgtgtaattgaatttgttacacgatctacagagctgtttaacgtttgtactgagtcaccgatacctttaacagcatctacaactgagtttaaacgatctactttaccttgaatatcctcagttaaacggtttactttatgaagtaaatctgttgtttcacgagtaataccttgaacttgaccttctacaccatcaagtgtttttgcaacataatctaagtttttcttaacagaatttaatacagctacgataccgatacataaaattaagaatgcaatcgcagcgataattccagcaattggtaaaatccaatccattaaaaacgcctcctaattaacatgtaataatgtcattaataataaatacccatactactctattataaacatattaaaacgcatttttcatgcctaatttatctaaatatgcattttgtaatttttgaatatcacctgcacccataaataaaacaacagcattatcaaattgttctaatacattaatagaatcttcattaattaacgatgcaccttcaattttatcaattaaatcttgtatcgttaatgcgccagtattttctctaattgatccaaaaatttcacataagaatacacgatctgctttacttaaactttctgcaaattcatttaaaaatgcttgtgttctagagaaagtgtgtggttgaaatactgcaacaacttctttatgtggatatttttttcgtgctgtttcaattgtagcactaatttctcttggatggtgtgcataatcatctacgataacttgatttgcaattgtagtttcattgaaacgacgtttaacaccaccaaacgtttctaatgcttctttaatatttgtaacatctagcttctctaaataactaatcgcaattacagctaatgcatttaaaactgtatggtcaccatattgtggagacaggaagtgatcataaaactcaccatccacatacacatcaaaagcagtacctttatccgtaatttgaatattttgagcataaatgtcatccgaatctttaaatccatagtaataaattggaacatctgcttcaattttacgtagatgttcatcatcaccccaagcaataataccttttttaacattatgtgccatttcttggaatgcatcaaaaacatcattaatatctttgaaataatcaggatgatcgaaatcaatatttgtcataattgcgtaatcaggtttataacttaaaaagtgacgtctatattcacatgcctcaaaagcgaaataatcactttcaggcaatcccatacctgtgccatcaccaattaaaaatgaagtctttttatcaccattcataacatgtgataataaacctgttgtagaagttttaccatgtgcaccagttacagctactgaagtatattgatcaataatctgtcctaaaaaatcattataacttacaacatctaatttcaattgatgtgcacgtactatttcttcatggctactcgcgaatgcattaccttgtataactaccatatcttcttttatgttattagcatcaaatggtaatatttttatccccttatttctaagagcaacttctgtaaatacgtagttctcaatatccgatccttgaacttcatgtcctaaatcatgcatgatttgtgctaatgaactcatgccagaacctttaattccgacaaaatgatagtgtgtcattatataaaactccttactcataattattctttatttaaatctgcttccgtaacataaacatcccttggttttgaaccattagcactcgaaacataaccgagttgctctaattgatcgataattcttgctgctctattatagccaatttggaaatgtctttggattaatgatgttgaaatatgtccttcattaaccataaatgcacaaacatcatcaaataattcatcttgtgattgtgtttgtgtttttttcaacaattctttttcttcaaatagatagtccggttctctttgttgtttgataaaatcaacaacatcatcaatttcgtcatcagaaacaaatgtaccttgaactctaatcggtttattcataccgctaccaagatataacatatcgccatatcctaacaagcgttctgctccaccactgtctaatatcgttctcgaatctacacttgatgataccataaatgcaattcttgttggtatgttggctttaattaaacctgtaattacattgacagatggtctttgcgtagctactaacatatgaataccacatgctctcgctttttgagcaattctagcaatagactgctcaacttcttgcggagccatcatcattaaatcagccaactcatcaattactatgacaatttttggcattctttcatcatatggtgcttttttgttaaatgctgttatattacgtacatggtaatgtgcaaataacttataacgtctttccatttcttctacggcccattttaaactctgtgtagctgctttgacatctgtaattaccggtgcaactaaatgtggcaaaccattataaggagctaattcaaccatttttggatcgataagtaataatcttaattcctcagggtgatttttatatagtaaagacatcaaaatactattgatacaaactgatttccctgatccagttgcacctgcaattagtgcgtgtggcgttttagcaatatccataagtaatggttcattattaattctataccccatcgcaactgttaatttagattcagcatttttaaaacttggagattcaataatagaacgtaagttgactgtcgttggattttggttcggaacttcaataccaacacgactagttcctggaattggcgcttctatacgaatatctttcgctgccaatgccattttaatgtcatcttgtaatgccgtaattcttgaaactttaacacctttttcaactgataattcaaatcttgtaacacttggaccttcagttacatcttgtacttctgcaggtacattaaagtaaaataatgcgtcattaagttctttctttttatctgtaatccagtcctcatccggctcaataactagtggttcttctagtaatgaaacacttggcaatttaatatttgggcctttacgaatcatcggcttagatgtttgtacagcttgatttgttgcaacatcttgctgattcgtccgagttctattttcattagctgtatcttcattttgatttgaaaatgaaggctttaaatctttttgttgatcatcattatcttgttgtccactagtattgtttggatgtgttgtttcttcgctttcttcagttatgtcgcttacttctgaaactgaagacgaagttgattgatcaacttgctcattttccaattgattatcatcttggctttcttcaaatatttccgtttgagttgaatcagcagaaggtttctgctctgaatattgttgtgcattttgataatcattttctgtttctgcatgaccaataagttgattgttctcaacattgtttgatgtcatattatttgttttatatgcatttgtgtttgactcttgtgaatcagtgcttgatgatggtgtggcttgactcgcagtcttgctttcgctcacagcttgcttactttgtacaggctttaattcaggcacattgacttttgaatgctttttacgatccatcatacgctttttatcagatggcgtcatgacaacattaaatggtcttttacttaaagttgaaaccttttcagtctgtttctttggatttacgttttcaatagttttctcttcaacattttgttcactttcagctgcttcgttttgcacattttctgtaatttctgcgttatgcttttctatttcattcatgcttgaatcttccacaacatgaccatcattcacatcattcgttttcaatgagttgacacttaagtttgtttggtcatcttttttatgacgcggcgctaattcaatttcattatcaaccgttttatcgatattattaacttgagattcagttactgcgtgctcttgcgttttaggagcgtctacatgcatttcagacgcgtttctattggtattatcttcgctatttgaagtagtattctcatctacttctgtatcatttaattcataaaactctgcatcatcgatttgacttcctgaatattcttctttattcgttgctccatcttcttctgaatcagcaattaatcttgattgattttttagttcatcttgatcatttacttcaacgttatgttgtagtgctgattgacgttgagacgttacatccgaaaccgtaacttcatcatctgacaattgttgtgttgtcgatacttgattcaaactaacttcctcataattgtatggactttcatctacatgagtgtcatcagtgtcttcattttgtattgacgcttgtttattttcatcatttgatacagcttcattctctatgccatttgtatgaagctgactagcctctgtactattatctgttaagtcactatcatcatttaatgaactatcaccaacatagcgttccgcttgtttagcatacatttcatcaattgcacgttgtattgcatcttgctcttcgtttttatgttcttcacgcttttgttgcaacgcttttttaaatcgacgcttttgaagcactttacgttctcgttcacgtctaatttcttcaacaatttgtgaagcataaatattttcaattttgatagtattatcaacttttgaataattaggcgctgattttgttgttgatgatacattttcatctaatgatttagatgcagttccttgtttgacaacactatcattttgtttctcttgttctaaatgtttattttgagacgtttgcgtcttagctacatatttatcatatttttgtttatctgactcaactttttctgaaggtttacttacagggatacgaccattttctaactttttaggtttcattgtgccaaaaatagctgacggtacctctgaagtcttgaaactttctttgtgataatctggagttgaatctttagcacgatgatttgtattattagaatacatattgtgtgtttttgacttgtgcgtttccttctcaataccattaattgcagaaacatatgtacctggcttattcgtatggtaatgtgaatgatctttatattttatactttgctgtgatattttagaattcccacgttgttcactataattttgttcttcagttgtttgatttcttctacggcgatgtcgtttttgtgaacgagaatcgtggctttgtttgcgatagtctcgatggtattgttctttttcatctgaaatagtatctgcagattgttcaacattttcattttcataagctacgctcataggaaaacggaatttccccctcggacgactataaatatcattattttgaggcagtaatgagtcatgatcgttatctatattttgtgattcttgacgtctttttttctttctatgaatcaagtcatcatttgaatcattatcttcgccgaataatttatcaaaccagctcatattttcactaccttccttaattattcaaaaaatgcttgtccaatttcatagctgtcatttaataccataatacctttttcttcaggtgcattaggtaaattcaattctttcattgaacaaatcataccgcttgaggcaacaccacgtaattcagcatctttaattaccataccgctaggcatcactgcacctactttagcaacaacaactttctgtccagcttcaacgttaggcgcgccacatacaatttgtaatgtgtcatttccaacgtttacatttagtacacttaatttatctgcatcaggatgtttgtctttagtttcaacgtagccaactacaaatttcggtgatagatcagcatttaatttataatcaaaaccagcttctgaaatacgcttttggaatacatttacaagttcatcagttaatttaatatgacctgtttcttcaattgttatatcttttgaaatttcaaaaatattataacctacaacattaccttcattagtaatttcaacaacgttaccttttttattgtagtttaattcaccttcaactggttcaatttgtaaaaatgcgacatctcctacatatttaggattgtaaaataaattcattatgacaaaactccttatccaattatttctatttatctttattaaatttacgacgatttgcttctaaacgctgaatcacgtttggatctcttttttgtttattatttttacctaaaataaatatcggttcaagatgaccctgtttatatccaaaggataatgatgtaattggaactagacctttagtgaaaaattccattgttaaatgtgccatcacatcatatcctgttttattgcgtatatctgcaataattaacacatcttggtgtggcactgctacgagcatttcgccttgacattgtgcctcaatttcatttaaaaatgcagtatttagtatcctacttgcatcatacccgtcatttgagttaataaaataaaaaatattaccttttacttcatcagtcgtatatgaatttgacaattttctaacattaaacagagacatttctcttatttgttgttcagttaacttcaaatcctctaacatgctttcatcaattaaacgatatgatttccctaaatcgactgcataataaactgctgtttctgcagtatgctcatcatagataaaaggaacaccttgtttagtttttttatcaaagctagtcgctctaatgacaggcataatttgactagatgatatactctcaagggttttatctgccatttgtgcaatagcttcatcaacgtaataaacaattttatctacaattttttcttttttatcttcatattttgcgacaatagcgttaagtttaatcgtgatacctttgttattatctgttcgataaatacgcaaagtttcttcttcacgattaaatttaaaatcaacgtttaaatggcttaaacgttcctttaatttatctctcatttgaaaggtattcatatgtaacactcctaatttcgcaccttataatagtttacaataaatcaacacatagtaacagagaaaaacgagtattaccccgtttttctctagtctaaattacacgtattgagctaaaaatgcatctatctgttcaattgattttcgttcttttccaatataacttccaagcagttctccatttttatatactagaaaacttggaatccccataataccattttcaatacaaatatccataaatttatcacggtctactgatacgaagtcaaacataggatatctcgcttctaattccggtaaatctggctctatcactctacaatctggacaccagcctgcagtgaattcaaatactgtagcaccttgttttaaagattcaaattgttgttctgattcaagttgtttcatttttatgtctccttaattaatgattatatataactatttagagataatagttgttattacccgattatttatattgtaatgtttctatttgattattatctaaattacaaatggcttctgaaagtaaagatctagctgcaaaatagtctcttatatcaaatactgagtctgtactatgaatatatcgtgcacatacaccaataactgcagtcggaataccaatattagctttatgaatttctccaccatctgttccacctggtgacatatagtattgatgttcaatgtcatgtgcttctactaactttaataaatagtctctaaatgcaggctttaaaatcattgtaccgtcttttatgcgaattaacgtacctttaccaagttcaccggataatggttggttacctttaacgtcattggcaggtgaacaatcgactacaaatgcaacgtctgggtctatcatctctgcagatgctttcgcacctcgtaatccaacctcttcttgaacatttgcgccaacatacaagtctacatctaattctatatcttttaataattctagtatttcaattgccaagacacaaccataacgattatcccatgctttagcactataacgatgttcagataactgtgtgaatggcgtgtgaggtacaattgtatctcctatatctattccgcgctcacgcacttcatcttcattttgagcacctatatctaatgttaaatctttaatttccggtgcaccttcactaccagtacgaaaatgtttaggtatattagaaacaacaccgataattttatcgccatttctatttttaattactaagcgttgtccttgccaaatatcatttgcaacaccacctaaatttgtgaattgaatcattccatttttagtgatgtttgtaatcataaatctaatttcatccatatgtgctgcaatcattacacgttttgcatttggatttttagattttttcacaccaaaaaaaccacccatacgattttcaataaactcatctacgtacggcgccatttgctgagtcatataattttttacttcttcttcaaaacctggtgccccatgaagctcagttaacgtttgaattcgttgtaatgttacttttttatttatgttcataaaagttctcactccttataagttattatatcatcttcaatatggtaaactaatgatatgaatttgaaatcaagggagcataaatgatgactaaactgaaatatataattccaacaataattgcagtagccattgtaattatttctaccatttcaatcatccaatttattaatcgtaaacgctataatcccgttaaagtacttaatgaagtaaaatcatattttatgaatgtcaaaggctcatatatcgtttatgaaccattcgttcatcctgaaactgataaataccgtttagtttatcaaggtggaattacaactattaaaaatggtcaaaatattcattatgatttttatgcagatgcatatactggtgaagtcattaacattgtagagcgttaatacgaattttatccatatttgatttggatcgtaaaacttaaaaatgagccacaccctaattagtaagataggatgtggctcaattttttattcttgaaaatttgtttagtaatacatctttattttagttattatcaactaatgtttcacgtaaaatatatgcatctatgttttcaccatcatcgctgtattttacagcaaaatagttttcatcatgataaaacaagaaccaatattgttgctggataaaatatggtatcatgcgttccttttcacgaatcgattgcataggataatcatcatatgccgttacccatagaggatttttatgtgcagtagtcgggaatatatcacccatatgaactgctttatctccttgactttcaatcgtaatgattgtgtgcccaaagctatgacctccactatgttgcatcttgatacccggaaccggttcaaaatgtttttcgaataaaatcaacttgttactataatcgcctttattcttatcccagtaagttgatttacttcttatattaggtgcaataaactcatgccactcatcttgttgcacaacatgaatcgcattttcaaaaattgcatgtcccgcttgatcagtcaaaccggctgcatgatcaaaatgcatatgtgtcattagcacgtaatcaatatcctttggcgttaaattataatttgccaaatcagcaattatatgactttcttcatctactccaaaattacgtaattgcttttcagataatttaccattaccaatacccgcatctataatcaaattatattgagccgtttgaatcaaaattggatgtgtcggtaaattgatttgatttcgttcatttgcattgtattgctttgaccacaacggcttcggaacaacaccaaacattgcaccgccatccatttttgtattgccgccatttagataatgaatagatatatccccgattttcataacatcacctattctttctgtattcgttattacaattagcatgtgtttattacatcatatcactattcataaatgcgaacaaaaacgaaacgccccacactaatgcacttccaactacttataaagattaatgcaatcatattatatgtaaatgcatcataaccatcggactgtaattttaaattaataattaaaatttccaagtaaaatgcaagatttatacttttaaatcaaaggtatttagtataacattgttcatagacgcattatctcctttagttatttgtttagtcacttttaattatagagataattgcgctttttttatattcaacatcaaaaaatcggacagatgaaaagtaaatactttttccatcagtccgatttattatagaacctttttctatagaaccattatagtacaaaaaacacttatgattgtatgtgtacatatcctcataagtgttttatttttgtgaatggaatttcgcttccatacgataaatacgtgaccctttatccgaaaatttcttttcatattctgttaaaatattactgccatcgtcttcttgatgtaaatttagatttatttttgtaaaatacattccaaattgagacatactttctaaactgtaggcaaatagtcctctgttatcagttttaaaatgtaaatctccttcatcatttaagatttgttgatacaacgctaaaaacgtatgatacgttaaacgtcgttttgcatgacgattttttggccatggatctgaaaagttcaaataaatacgcgaaacttcgccgtctttaaaatattcatttaattcaatggcatcattacaaataatctttaaatttgttaaacccatctctttaactttatccaatactttataaacgatacttttctcacgttccattgaaatatagttaatatgaggattttgagcagctaatgttgtaataaactgccccattcccgaaccaatttcaatgtgtatcggttgcgttttatcaaaccattcagtcattttccctgcatgttgaccgtccatgtcaaccaattcaggatgatcttttaaataatcttcagcccatggtttgtatcgaactctcatattttattctcctcttaaataaacatgttactattcataacttcatttaggaatttaagccaagtgttcatatccttatatcttttttgctcttcataccattgaacaagacctatagattgaattaccgtataccatttcatacgtttatttaaattcaagctctcttgaacaccatatgtttcaagccattcagaccattgttgttgtggaacatagttgtaaagcagcattccgatatcaattgctgggtctgcaatcattgcgccttcccaatcgactaaaaatagttcatcacgatcagataataaccaattattatgattcacatcaccatgtacaactgtgaaaaaacgtgaatctaaactcggcatatgctcttccaaataagttaatgattttctcacaatatgatgtgttaaaacttctcttgataaagaggcattaattttattaagcataatctcaggagtaatgggttccatttccatacgctttaacatacttaataaaggtctagaattgtgtatcttctttaataaatgtgcaactcttgtttgcttcatttcatttgaagatagttcacggccatttttccaatgttgtgctgtaacaacctcgcctgtttctatgcgtttcgtccatactaatttgggcacaataccttctgctgataatgccgcaataaatggatttgaatttcgttttaaaaacaacttttgtccatcttgttcagccatatatgcttcgccagatgcaccacctgcagaatcaagtgtccaccctaattgataaaactgctccaactcgtccacctcactttcaattagaaaatggctctagaaataggtttttcaagagccatatattctaatttataacaccatactggtacaaatattatgtccagataattattgtaaatccttaactaatgcctacattacacgactaaatttaaatcgtaatgtctgtcattgacaccatacattctatagtcacttacttgacataaaatgttaccgtgtctaaaactacatgtttttgtaacttttgtaggcgataaactctagttttcaaaataattgctatcccattttcatggttagcataaatttatgaactgtaacatttacgtacttagtaaaatatgatgcacatcatatttgtaactcatagaaaattttataatttttatcattatatttcaactgaaaatgagaaacaaaatggcactttttactaatatgtgttttctaaacaacacttttaagcttcgttttaaattataacataattcacttacgaaagttgataaatttaagtaatttaatctaaaaatatgatgaaagaattttaaatactgtttgactctatatacttttcaaatccttcttgtagttgacgcgtaattgggccaactttaccatcattaactggttcaccatctaatttaataacaggtgtaacctcagctgaagtacttgaaacaataacttcatctgcgtttttcaagaaatctacagtaaacgtttcttctttaaatgggatattatagtctttggcaatttttttaattacaattcgtgtaataccattaagaatatagttgttaatcggatgtgtataaatcacaccgtctttaattgcataagcattacttgaagatccttcagttacagtttcgcctcgatgttgaattgcttcaactgcattatatttcacagcatattcttttgctaatacatttcctaataagttcaagcttttaatgtcgcaacgtaaccatcggatatcttcaacggtaacaccattcacaccattttctaaatgatcataaggacgatcataactctttgtataagcaacaattgctggttccacttcaggtgtcgggaagctatgatttctttcagctacaccacgcgttgcttgaatataaattgccccagtttcaatttgattcatatcaactaatttacgagatagttcaattaattcttctacagaataatttaaatctaaaccaatctcattggcactacgtaaaaatctttcataatgttctgttactgtaaataacttaccattatatactcgaatgtattcataaataccatcgccaaatacgtatcctctgtcgttgtatgaaacctttgcttcacttggacttacaaactcaccatttaaaaaaattttttccatatattattcctccacgcataatgaataaattgcttctaagtaaatactagttgcgttaaataactgttttttagtgatatattcatttttctgatgcattaaatcttcagaatcactaaacattgcgccaaatgctacacccttgtctaagtttctcgcataagtaccgccacctatagtataaggttcagtcatatcatttgtttgatttctatatgcagtaactaacttttgtacaaaaggatcatttttatcaacataatgtggtggttggactttacctaatttcacttcaaagccatattgttgaatctcatttgcaaaacgatccatagctttttcaaattcaaatccctctgggtagcgtaagttgataccgaaaagacccgcattttcattatcatatgtaataacaccaatgttagttgtcacatcacccatgacatctgtatggaatttcattcccatcttttcaccaaaatctgaattaaataagtagcgattactaaatgctacaaacgcttgtgcattattatcaagatttaatgatgctaagaattttagtaagtaaagacccgcattcacaccgatagatggatccataccatgaaccgctttaccttcaactgttaaaactagaatgccactatcaacagtactatcaccttgtaaatgattttgttctaaaaagtactcaaagtcttgaataacatctgtcatattttctttaacaagcactcttgcttctgcatgatcaggtaccatgttgtaacgttcaccagatttaaaagttattaattcataatcaggttcatcttgatcttcagcaagcttatcttgaactaagtcaaatgttgtaatgcctttttcaccatgaatacacggaaattctgcatctggtgcaaaacctaatgttggcatttcttctgttttaaaatagcgatccgtacatttccaatcagattcttcatccgtaccaataatcatatgaatacgtttcttccaatccacattcatatcttctaatatcttaattgcataataagcagcaattgttggacctttgtcatcaagtgtacctctagctatgatagcatcttctgttacgaccggttcaaacgggttactatcccatccatcaccagcaggaacaacgtcaacatgacataagatacctaatacgtcatttcctttacctgcctcaattcttcctgcaatatgatccacatcatgtgttgtaaatccatctctatgtgcaatttcatacatgtagtctaatgccttacgaggacctggaccaactggtgcgtcttctgatgcttttgcatcatctctcacactttcaattgctaataatccttttaagtcattaatgatttgatcttcgtattgttgaactttttctttccacattcgaaatcgacttccttttttctataagttaaactctattttacatgaaatgatataaaaactacaataagatgtcagaaaataataaaaaggaacaaaacgatgctatcgatatgacacaaatcattaatagctgctttgttccttttttaatttatatatttaaatcaagagctcgagaaataagtcaatgcgctaggcacacaatttaacattaactgtaattaactgaacgaaaatgcgccctggggccccaacacagaagctggccaatagtcagctttcaataatgtgcaagttggcgggacccaacatagagaatttcgaaaagataaagaaatacgctttctttagatattagtatttcttatgcatgagtttcactcatgtattcttctttctaaatacattttagctatgactaaagataaagaaccactatataataaatcatagtggttctttatcatttctgtcctactcacatcttattctttatcagacaatgcatttttattcttttttaaatcttcttcagtgacgatacgtaaattattatttggtgctgcgccaccttcatcatcaaatttacctttttcaatactttcgtcagtcttattgtcaaattcggtaaattttgatttttcttcttcgaaaaatgcttttggattattttttaatctattagcatattctttcggatttgtttttacttctttaattgtttcatttgcaattgttcctaattgcgtcgctttatccttagcattatctttatagctttgaggatcttgtttatatttattatattctgctttcagcttgtcacgactatctttacgtgtaacaagtacagctgctacagcgccacctatacctaaaatcgctttaaataaattaccttttgccatatcaatcgtctcccttttatttataatttaatttgtcaaaatcattttcagttaataaacgatattctcctgaatctaaattgctgtccaattctaaatcagcaattttgatacgtcttaaatgtaatacctcattttgaatgctatgaaacattcgtttaacttgatgatattttccttcataaattgttacgtgcgacgtttgattatcaatataagttaatattgcaggcttaaccttgccatcagacagtttcacaccctctttaaaagcttgaatgtcgtcttcagtgataggatttgctgaaataacttcatattttttagaaacatgtttgtttggactcattaattcatgattaaaatcaccatcattcgttatcaataaaagcccttctgtatctttatcaagacgaccaaccggaaaaatatttagatgttggtattcaggtattaaatcaataacggtttttgaatgatgatcttcagttgccgatatataaccttttggcttatttaacataatatagacattttcaacgtattctattaattctccacgaactgatatcttatcgttttctggttctatatgtgtttttggtgatttaattacttgttcgttgacatttacaaggccttttttaagtaactgtttgacctcattacgtgtaccgacgcccatatttgctaaaaatttatctattctcatcgtaaaaacctaactctacgtcttaatttttcaggaatttcacctaagaattcgtccgcaagacgcgttttaatagtgattgtaccgtaaattagaatacctactgtaacacctaaaataataatgattaagtaaccaagtttagtaggttctaagaatagatttgcaaggaagaatactaattctacacctagcatcataataaatgaatacaagaatatttttgcaaaatgaatccaactatagctgaatttaaacttcgcatattttttaagaatatagaaattacatccaattgcaaataataatgcgatactagtacttaaaattgcaccaggtgtatggaataacataattaatggatagtttaacgctaacttgataactacagaagctaaaataacataaactgttaatttctgtttatctataccttgtaacattgacgctgttacacttaatagtgaaattagtattgctacaggcgcataatagaataataagcgactaccatcatggttagggtcatgacctaaaacaattggatcgtaaccatagaaaactgtgaataatggttgtgccaaggccataattccaatactagctggaacagttataaacattaatacaccaatagatgttctaatttgatgatgcatttcatgtaagcgaccttctgcaaatgtttttgtaatataaggaattaaacttactgcaaagccagcacttaatgatgtcggaatcattacaattttattagttgacatatttagcatattaaagaatatatcttgtaactgtgaaggtataccaactaaagataaagcaccgttatgtgtaaattgatctactaagttaaataatggataattcaaacttacaataacgaacggaatactataagcaataatttctttatacatcttgccatatgacacatctatatctgtgtaatcagattcgaccatacgatcaatattatgcttacgctttctccagtaataccagagtgtgaatataccaataatcgcaccaactgctgctgcaaaagtagcaataccattggctaataaaatagaaccatcaaagacattaagtactaaataacttccgattaatatgaaaatcacgcgtgcaatttgctcagttacttctgacaccgctgttggccccatagatttataaccttggaatatacccctccatgtcgctaatacaggaataaagataacaaccatactaatgattcttataatccaagtaatatcatcgactgaccaaccgtttttatcatgaacgtttctagctaatgttaattcagaaatataaggtgctaggaaatacagtaccaagaaacctaaaacaccggtaatgctcattacaataaaactcgatttataaaatttctgactgactttatatgccccaatagcattgtatttcgcaacatatttcgaagctgctaaaggtacacctgctgtcgcaactgcaattgcaatattatatggtgcataagcgtatgtgaacggcgccatattttcttgtccaccaattaaatagttgaatggaatgataaaaagtacgcccaataccttggtaattaatatactaatggtaattaaaaaggttccacgcaccatttctttactttcactcattacgaatctccctatctcatgtttattaaagttttgtaaactaaaagctatttctctgtaaaatcatttttcattattatgaatatatcacaaaactttatttcattgtcgtatattcaatgaattatcataacaaaattatcaacgcattgtcattgaatactcgattttgattagaatattacgaaatttcatatgaacattatactactatttgagatgaacatcgcataacagtagaaaaatcattcttatcatacacatacatcttcaatttttatgaagttcacattataaatatattcaacataattgtcatctcataacataagagatatagcaaagtttaaaaaagtactataaaatagcaattgaatgtccagtaacaaatttggaggaagcgtatatgtatcaaacaattattatcggaggcggacctagcggcttaatggcggcagtagctgcaagcgaacaaagtaacaatgtgttactcattgaaaaaaagaaaggtctaggtcgtaaactcaaaatatctggtggcggtagatgtaacgtaactaatcgattaccatatgctgaaattattaagaacattcctggaaatgggaaatttttatatagtcccttttcaatttttgataatgaatccatcatagatttttttgagtctaggggtgttaaattaaaagaagaagatcacgggcgtatgtttccagtctccaacaaagcacaagacgtggttgatacattagtgacaactatcgaacgccaacatgtaacgattaaagaagaagaagctgttagtagaatcgaagttaatacagaccaaactttcactgtacatactcaaagcagcagctatgtaagtcattcacttgtgattgctacaggtggtacaagtgtccctcaaacaggttcaactggtgatggttataagttcgcacaagatttaggtcataccattacagagttattcccgaccgaagttccaattacatcagctgaacctttcatcaaatcaaatcgtctaaaaggtttaagtttaaaagatgttgaattgtcagtacttaagaaaaatggtaaaaaacgcatcagtcatcaaatggatatgttatttactcattttggtatcagtggtccagctacattaagatgtagtcagtttgtttataaagaacaaaaaaatcaaaagacacagcatatttctatggcaatcgatgcatttcctgaattaaaccatgaacaattaaaacaacacatcacatcattattatcggacacaccagataaaatcattaaaaacagcttgcatggactaattgaagagcgctatttactgttcatgctggaacaagctggaatcgatgaaaataccacatcacatcacttatcaaatcaacaattgaacgacttagtaaatatgtttaaagggtttgtatttaaggtaaacgggacattacctatagataaggcatttgtcacaggcggtggtgtgtcacttaaagaaattcaacctaaaacaatgatgtctaaattagtcccgggattatttttatgtggtgaagtattagatattcatggttatactggtggttataatattacaagtgcactcgtaacaggacatgtcgctggattatatgccggtcattactcacatgcatcaatggaataatagtataaaatttggttcgattctctttagtagattaactttttcattcaattaaaaatgaccttaatataactgagtcactaaaaagtgtcgttatattaaggtcatttcgttaattatgattctttttcgtttttagtacgtcttctagctaacaaagccgcacctgtaatcagtgcaaattctttcaatggtaaatccattccttcagaacctgtatttggaagttctttttcaactttgcgcgattcatgtgtctcttcttttttaataggcgtacaaacttttggagctgactgaattacttttggtgatactttcgtcgcttcagctggtaatttaattgctaaaatttcatcaacaatgaattgcgtatgttgtttgatgtcatttaatgtcgcatcttcatcaatcattctattgccatctgtaacatattgatcaattaatgcttttactttagctaattgttctgctgttgcgatcgctttgaatttcgcatatgtttgttgagcaatgttatcaatgcgcagtaagctattttctttttcagtaattactgcttctatatcgcctaatgcaacattaaatcgttttaaaactgcatcaacatcagcattagtgcgtgctgtttttaattcttcatccatttgtaattttaatgcagttatagcttttaatgcatcagccttattacgatcacttacttttcgataattttgcactaaatgtgtaacacgcgcaagatcatcattaatcgttttttcagcatctggcttcttaataggatgtacatctaaatcatgtattgtttgtagatttaatgatgctgttttatcaacttgtgcattgctacgatcttgatcaatttgtccaatagcagtgtcataaatgttttgtaactgagctaaaatactatttctttcttctaccgttgcttgaatattcgcttcaattgcttgtttcttatcattgagcaatgttgttaattgttctcgagcagacgcttttctgttaataacaggttcgatttcacgaatttcattttttccatcatgcaataaatatgccacatcagcattcgtcactgcactagcaatttgttgtttagctttaattaactctttttcaacttgtgctattgcagcattttgttcttcatctgtcgcttcgttatttgctttaattaaattaattttatttgtagcgatattttgaatttgttgtaatgctgttgctttaactgttgtcgctggttttatttttgaaataatattttgagcatcgatactattttgattaacttgcacagttttatctgcatgattgatctgatcaatagcctgattaagtgcttgttctactaaatgtttagcagctaatctttcttcttcggtagataaatcactttgatcaataagtgcattttgagcttcagcttttgcgctgacagattgacgcgctgctggtttaacttgaactttaggtaaaatcactttaatgttgttgttaccatcagcctcagtttgatccacttctgcattcgttttgttttgtgcaatatcatttttaattgcattaacaattttatttaacgtatcaatagcaacatttcgttcatcttgcgtagtatctaacgtatttcggattgcatcgagttggttattattactttcatcaatgttatccaacgctgcacgtttacgtctaactttcggtttaatttgttcgattgccttaattgtttgatttctaacatcatttacagctgcatcttgtgtcgtattgtctatatcttgttgcgcttttttgagcgtgtcgctaattaattgattcgcttcatctaattcatcaactgttgcatgtggtgtatcttttattaattctacttgattttctgcacttgcttttattgcttgttgtgcttcaggcttaattacaatatgaggctgtacaccttttagtgtagcaatgccatttgtttcaacacgtttcacatcattattcgttactgcttgattgatgttttgtaatgcaagtttttcattattcgctaattgatttaaagcaacttgtttttcttcatcagtcgcatgttcagcttgctcaatttcttgctttttagcttcatattgttgcttaactgcatctctagcaccagctctaacaatatgttcaggcgttactaaagcaatgctatcaagcgcttgactagttgtatcatcaacttgttgatttgttctattattcgtaatatctgtcatggcttgatttacaaattcattgattttatctagtgctacttgtctttcttctgctgttgcttctttatcctgattaatcttcgcacgtaattcattcgctttttgattgattttttcacgtgcagctggtttaactttagtttcaggttgaataattttaattgctgatacaccatttgttgctgcttgattcacctgactgttcgtttgagcttggtcaatagctgcaagtgctttttctttttctttagttaatgcttgtgaagcaacttctttctcattatctgttgaatcaagactattatcaatttgctgttgcttttctttaacagctttttcaatatctgcaattgcctttggtttaattactacttcggcttcaacattatctatagcatttaccgcttgatttgtagttgcgtctacttgatcatttgtttggttttgattaatttgattaaatgcttgatctttaagttgattgatttgattaacagcagcctgcttttcttcatcagttgcattaggtgtttgtttaaccgcttcaatacgcttcgccacttcagcagtgattttatctcgcgctgcttgtttttttactacgtcaacttgaacagcatcgatattattctctgccactgtcgcagcttggtctacttccgcatttgtgttagcttgtttaatactttcaatagcttgttgtctgtcttgatttaaagtattaatcgcagcatttttctcatcattcgttgcatctggtgtagcattgatttcagctaatttagtattataatgctgattgatttgtgctagtgctgcaggttttttaacaatatttggctgaatcgcattaattgcttttgtacctaattgttgcgcttgatctacttccgcatttgtatcagcttgatttatattattaattgccgttgctaattcttggtctacttgatttaatgctacttgcttttcttcagtggttgcatttgtattttgattaatttcttgtttttttgcagttgctaagtcagttaatacacctgtagcagtttgtttcttcgttacatgcggttgaactgcgccgatttgattgactgcatcgtctctaatactattgaccatcgcagtagtagacgtcacaccaatatcagttaatgctctatttttaagtgtattgacacgatttatcgcttcttgtttctcttctcgagtcgcgccaggtgtagcattgatatttgttatcgcctctcgcgctttatcatttacagcattgcgagcatccgttttaacttgtgttgccggttgaatcacaactatattttgtgtgccttgatcttttgcttgtgcaacttcttgattcgtatctgctgcattaatattttgcttcgctgtggctacagcttgatcaagtaattgttgtgctgcttgttgttcttcgagcgtcgcatcattattattaaatatcgtattatgttgcgtttccgcacttttatcgatggcattttttgcatctgtttttacttttgtagctggtgtaattgcttgtattccttgaatcgcatttgtctttacttgttcaacatcagcattggtattagcgtttaaaatgtttgtgtttgctgcagttacagcagcattcactttgtcaattgctgcttgtctttcttcttgagtcgcatcaggattagcattaatctctgcgatatgttgttgtgcatcatgtgatacggcatcccttgcagcttgcttaacaacagttacaggagcaattggattaatggcatttagaccatctcctttggcgttatcaacatcagcatttgttgttgcttgattgatttgttctaaagcatggttggttgcttgagttaattcgttcaatgctgcatttttctcttcctgagttgcttctctattactatttatttgttgtcttttcgttgctgttgcttggttaattgcatctcttgcagcttttttatgagttacttgaggaacaactgctccaatagtattgatgccattatttttagctgtttctacgtcagtatttgtagtagcattcgtaacattatcaatagcatctgtttcatccgtagctaattgatttagtgcatcttgaatctcgtcttcagtagcatctggtgttgcattgataattgccctttgtttcgttgctttatcacgtattgcttttttagcatttggtttaacaaccggtgttgcagtatccccacttaatgtctgtataccttgatctttgattctagtaacgccatcatcagtcgtttggtcaccaatattaccaataatttcatttttatgttcctcgataacttgtattgctgcttgtttttcttcatctgtcagttcatcattttggtttactaaatcttccatttggtcaacttttttattaactgcattttcagcatcaacacttcgaattaacgtgtgttgcatttgattagttaatgaatcaatatctgcttgagaaactcttttatttaatggtacattgttacgattttcatctaaaatcgtttgtgcgcgtcgtttcagaccattaaaaatatctaatgatgcaaatgtataatcagcttgttgaatacgtctgtcaacttcggcttgtaatgcatctttattcattatgatatcgattgtatatggatttgtacttacagtatgactttcagcagctgaattaatgaaatcttgtgtatatgttttatacgttaatgtctcgttaaatgttactgttcttggtgtcggcacattatttacacgtaatttatatcttaaatcgagtattttatcaggcataagtcgtgccggagagtttgctgtacctcctccagtacttttaattgttatcacacgatttgctgcatcatatgtaacattcatatcattaacatcaacgcctgaattgttacttggaaaatctttagtcaatgaattgttcacatattcaacaccttcaggtaattgaacttgatatacaaagtcatttgtatctagagaagcaccagaattaccattattctttaatgatgttgttacagtaaactctttattatttgttgctgttggatccattgttcgtctttcaacataaacatgtgacccagaatgaagtccgatagagtcaacaaagctgtagtatttgtaaccatcttttagttgataaatgccacgcgcatctgttattgcgtcatttttaggtacaaattgaattttgagatttctcacattatcaggtactttaaataaacgcaaagttggaccgccttcaacagtcttttcagcaatcgtatcattagtatcagcatttttgataataacatttgttgcgccttgaccgtttttagtagacattgtattaaattcaaagattaattcagaattcggatttactgttaatgttttctcgataccattaaaatcgccatggtcattcgtatcagttccatgtatacgacctaatgcaattacatttccttgtgcttgatagttcttattatctcctgaatcaaacatgctcgttcttaccattgcatgactaaacacccctactttaccaccattgattagtgtgaagcccggcaagttattaacaacgtttactgttggcacagagcggttggtacttggtctaataccattgtcatcaaaagacagcacttcgttaggtgcattttgtcctgcattattggcattgggatctgttgttggcgtgtatggcgctgtatttccagctggcacagtgccattagccgctgcagccgctggatctgctggagttgcattaggatctgccggtgcggcacgtctacttctctttttcggtctattagatgcctgttcagcaattgcaactagctctggtttatctgaagaatgacgaacatcttcttgaatttcctttaaagttagatgtcctcctgaaccattttcatttgttctatttggtacatttaatgtggtattattcgacactacatcattattattagcgtttgacactgtctctgttgctgttgaattagcatcagaatgattattattttgcgtaggcgacgcgctaggctgtattggagctggcgtagcttgatttgctatactaccattattatgattaaccaatgcttgattcgttgattgattagttgttgcagattgattaggtgtattctgcgcactatttgctaaacctctattattagcaacatttgtatcttgtgaatttacaggtgttgcttgattagtatcgctttgtacattattatccgtagttaaggcttgtgcaccatttgggtttgaaagtaataaaactgttccgattaaagtagagaatatgcctactttatacttcctaatactatatttatttttctttaacaaattcatttcattttcctcctggttgtctgttctctgctgtgttgtttagaattatgctaaaaatatacgttccctcacattatgtttatagctatattattttgtacaatattttaagttcactcaattttatcatcatcattttataaaataaagttttattttattacaatttagtttccgttttgtaattaaaatcttaataaaacataacaagaacgctttagattgttttgtaacagaaagcaattcataccaaaaaaacaccaagcaaccgaaaagttacttggtgtcattacaaatgtaatattattttaaattatgtcactactttaaatactttttatttccaaaccttcatcgccccaagcgtgcatgccgccttcgacatttacggcatcaatgccatttgcctctaaatattctacaactttggcactacgaacaccgccagcacaaacaatatagtaggtttcatttttattaaatacgtcaagattgtctggaatggtatccattggaattaactttgcattaggaatatatcccattgctgtttcttcatcagtacgaacatcaacaatttgaactgggtttgattctaaaagtttgttttttaattcatctgtagtaattgacttcattttaaagtcctccttaaaacattatttagctacaatattgactaatttttgaggaacagcgatgactttcatgatgtctttaccttcaatactcgcttttacattgtcattagataaggcaatttcttgcatttcttcttttgatgtatctttagcaattttaattttagctctcaatttaccattaacttgaacaacgatttctacttcatcatctacaagtagtgcttcgtcataagtcggccaaggttggtacgtaatagactcttcatgtcctaattttgaccataattcttcaccgatatgtggtgcaataggtgctaacattttaacgaagccttcaatgtaaggtttataaacttcatcaactttataacactcattaataaataccattaattgactaatagcagtattaaatcctaatgtttcaaagtcttctgttacctttttaacagtttgattataaactttatctaaagatttattatttgtagtaacaatttttgaacttaatgtaccgtcttcattaacaattaaacgccatacgcgatctaagaatcgacgagacccatctaatcctttttcactccatgcaattgcagcatctaaaggtcccataaacatttcgtaaagacgtaaagtatctgcaccatgagactgtactatatcatcaggattgattacatttcctttagatttactcatcttctcattaccttctcctaaaatcataccttggttaaataatttttggaaaggttctttagtaggtacgatacccaaatcataaaggactttatgccaaaatcttgcatataataagtgaagaaccgcatgttctactccaccgatatataaatcaacaggtaaccaatgttttaatttttcgggatctgctaacatattttcatttttaggatcgatgtaacgtaaataataccaacaactacctgcccattgtggcatcgtatttgtttcacgacgtcctttcataccagttttttcatctataacatttacaaatgaatcaatattagctagtggagactcaccagtccctgatggcttgatttcatctgtttcaggtaacaacaatggtagctcttcttcaggaacagttgtcattgttccatcttcccaatgaatgacaggaattggttcaccccaataacgctgacgactgaataaccaatctcttaatttgtaattaactttcttttcgccagcacctttttgatctaataattgaatagctttagtaattgccgcttcattttctaaaccatcaagttcaccagaattaatatgtttaccttcaccagtgtatgctgcttcttcaacatttccaccttcaatgacttcaatgattggcaaatcaaactttttagcaaattcaaaatctctgtcatcatgcgctggtactgccataattgctccagtaccatatgttgataatacataatcagcaatccaaatttgtactttttcaccagataaaggattaattgcatatgcaccagtaaacacacctgatttatcttttgctaaatctgtacgttctaaatctgactttttagaagcttctgtttgataagcttttactttttctttatattcatcagttgtaattgaattaactaatgcatgttcaggacttaagactaagaatgatgcaccatagattgtatctggtctagtcgtaaatacttctacttttccttccgcattatcaacatcaaatgcaactttggcaccttctgaacgtccaatccagttacgttgcatatcttttaaagactcaggccaatctaaatcatctaaatctgctaataattgatctgcatattctgtaattttaagtacccattgcttcattggtttacgataaactgggtgaccgccacgttcagatacaccgtcaatcacttcttcgttagataagacagtacctaatgcaggacaccagttaactgcaacttcgtcaacatatgctaaacctttgttatataactgtatgaaaatccactgtgtccatttatagtattctggatctgttgtattaacttcacgatcccaatcataactgaaccctaattctttaatttgtcgtttaaaagtttggatatttttctttgtaaattcacgtgggtcgttgccagtgtctaaagcatattgctctgctggtaatccgaatgcatcccaccccatcggatgtaacacattatatccttgcattctcttatatcttgaaatgatatctgttgctgtatagccttcaggatgtccaacatgtaaaccagcacctgatgggtatggaaacatgtctaaagcataaaatttcttttgacctaagttatcatttgttttaaatgttttattttcgtcccaatagtcttgccatttcttttcaatttgattgtggttgtaattcaacacatttcctcctattcaataaaaaagacacctctaactattctatttacatagggacgacatttgccgcgttaccaccctatttcacaaaaattgtgcactcattttaatagtaagagatgtcattcattcaatttaaaattaatacgatttacatttagtccttaacactagctctcagcatcactagctttctgtagaaaagctccaaacgaaattaaattatacaaattaatattatgttataacgacatttatttcaagtctataacgttaattctatttactcattatgcatctaattttttaggttgcgtattattctccttgaaaaccattaataatattaatgcatatacaagtagtagcatcataccgataaacatcatgcgcatattaaaagcatcaactaatacaccaccaagaaatggaccgaatgcttttcctactgtagcagctgaattcacaaaaccttggtactgtccttgcttaccatctggcgctaactgattggctatagttggaactgctggccatacaaacatttctccaaaagttaaaataatcataccgacaacaaatattgtaaagttttcggcaaagctcgtgacaaagaacgacaacataaaaatgatgatgccgacaaacatttgtttctttaagtttccttttaacagatagagaatcggtttaattaatggttgtgctactaaaatcattattccgttaattgtccataaaacactatattgtgccattgaaatattaatagtttgtgtaaatgatgcgattgtagactcccattgaatatacgcaacccaacaaattgcaaacattgcacaaattagtactaatgaaataaatcttgctttattctttttaccagtaatatctaaatgagttggatatttaactttcgcattaatttcaatattaaattgcgttaccgcgacaagtgcaaacacaacatacataataagattggctaaaaagatatagttaaagctaaattctgcgacaaagccgcccattgctgcgccgacagcaacaccaatattttgcgctaagtatatcgcattaaacgtttgccttccgccattcggccacactgctccagccattgcgtatatcgcaggaataatcattccgccaccaaagcctaacattacaagccatacagcataccaaggccacccgtgaaagaaattaagtagcgttgtactacaaagacaagtgaaagttccaattaaaatcgtcttgtatccacctaatttatcaaatagtgaaccacctaataagtttccaataaccatgccaaatgaatttatcattagcactaaaccagcaacagttaaactttttccaagttcttgtttcatataaattgtatttaaaggccacaaaaaactggaaccagtaatatttaacgccatgccaattactagccaccagactgatttaggtatattcatatttcatagttcctctctcttttttgtcaaactataataaacactataacattaaaatatgttaaaatctgtacttagaactctttttttatagaaaggaaaatgacatatgggcaatcatttccaatacgcttttgaaaacaaacgttatcacacatggaattaccatttaaaaaataaatttggacaaaaaatatttaaagttgcattggatggcgggtttgactgtcctaaccgcgatggcactgtagcacatggtggatgtacattttgttctgctgcaggtagcggagactttgcaggtaatcgtgcagattcaatcgcagtacaatttaaagaaattaaggaaaagatgcatgagaaatggcacgaaggaaaatatattgcttattttcaggcatttacaaatacacatgcaccagttgaagtattaaaagaaaaattcgaacctgtacttaaagaaccgggtgttgtgggattatctattggtacgcgtcctgactgtctaccagacgatgttgtcgaatatttagcagatttaaatcaacgaacatacttatgggttgaattaggactacaaacaatccatcaatcaacatctgatttaatcaatcgtgcccatgatatgaaaacttattatgatggtgtggcaaaattacgtaagcataatatcaatgtatgtacacacatcattaatggcttacctggcgaagactatgacatgatgatggctactgccaaagaagttgcacaaatggatgtacaaggtattaaaattcatttacttcatttgttaaaaggtacaccgatggtaaaacaatacgataaaggtttattaacttttatgactcaagaagaatacacaaacctagttgtggatcaattagaagtgattccccctgaaatgatcgttcaccgaattaccggtgatggtccaattgatatcatggtcggtccaatgtggagtgttaataaatgggaagtattaaatggcatcgatgctgaattagcacgtagaaattcttatcaagggttgcgttacaagtctaaggtgaagcaatgaaattagaacgtatactccctttttcaaaaacacttattaaacaacatataacaccagaaagtattgttgtagacgcaacttgcggtaacggcaatgacactttatttttagccgaacaagtaccagaaggacatgtttatggtttcgacattcaagatttagctttggaaaatacacgtgataaagttaaggatttcaatcatgtttctttaataaaagatggacatgaaaatattgaacatcatataaatgatgcacataaaggtcatattgatgcagccatctttaacctaggttatttgcctaaaggtgataaatctatcgtgacaaagcctgacacgacaatccaagctattaattcattgctatcattaatgtcaattgaaggtattatcgtacttgttatatatcatggtcatagcgaaggacaaattgagaagcatgcattgcttgattacttgagtactttggatcaaaagcatgcgcaagttttgcaatatcaatttttaaaccaacgtaatcatgctccattcatttgtgccatagaaaaaatttcttaagcatttgctgcgctatactatttataatttaggattgattagtcaacatttgaaaaattaatatcaacaacaaaaagaggttttcaacttaatgaaaacctctttttatgctattaaacttacacagcaataattgcatttaaactattttgcattgctgttgctctacttgcaatcgcatcactgatgaaattcaacaactctactttctcttgttgtaacttttcattgaaatgaataataactgttctttcatcgtcaacaggacgctctttgtaaatccattctaattcaactaaattattatacgttctcgtacgcttatacggtttaacttcaacaaatctgtccatttctttaagcgtcatagaacctttttgccataaagttagtaaaattaaaatttcttctctagacattttgtattcgctttcaatctcgctgaaaattgagttaatgtcacccaaaagtgtttctaattgcaaaatcccaaatacagtgtcgttatttacttttttcatgctaaacatctcccaattaataatcacatatttagctaccatacaagtattaacaaacatcccaacaatcccaaaacttgtatgtgctaacttatgcataaaactacaagtgtaaataaacttgctttctattcaattgtcaaagttgaataaaattaaataagtataaaaaccaataatcaatagagttaatatttagaaataagataatagtacataaaacaaatcactctattacatattaattttataatttatatacaaagaaaatatatcaatattaccattaaattgcaacaattctacatatatttcttcaaaaaagatacgcattgaatttttattacatataactctcatgaaaattgattaaactaaattaattagttagccttaaatttaacaaattaaatcaaaccgaatgaggctaaattggttatttttcaagatatgatttgtataaatcaaaacatttcttacaaatcaaatgtgtataaaatgtgatatacattctcaaccttaaaaaagtaaaaaaaagatgagcatctactgtctcatctttttagaatattaaatttctacaatttcgtcatcttcaacaataaagcccattgtattgacgctattatttaagaaagtcagaatataacgcattacttcatcgcgttctggctcattgtgaacctcgtggtaaaaaccttgccaagctttaaaatataattcaggtgtttgatatttttctttaaactcatcaattgccctagtatcaacaattaaatccttcgttccatacattaatagtgttggcattggttgaatgtcatgaatatgagccatcgtatctttcatcgtctcattaattgtattataccaatgatacgttgctttttttaacattaaaccatcgttaactgtttcttcaacaatttctaaattacgtgttaaatcttttggttctacaccaacattaaaacgtgtgtcttttgaaattttacctatatttgaaacaagtttatctttacgattttttccattcttttgaagttctagcataggagaaattaacatcatcccctcgattggcaattctactttttcaagtaaatttaataaaatcaaaccgccaagtcctacccctaatacataagtaggaattttatattcattagctatctttaaccagtctagcaaactttcgtgatacgtttgaaagttttcaatttgtcctttattagctcttgaagtttgaccttgaccaggcaaatctcccataatcacatgatagccatttcttcttaacatcgtaataacatatgcatatcttcccgtatgttctaatatattatgagcaataacaacgacgcctttcgcatcattttcagcttcccacttccacattattatactgcccctttttcattaatcttcaataacataattatagcaaattcactatgtagatttctatttatagtattattgttgtccatattattatatacaaatgaaatcaacatcaataatagtgtaattatacataattatttttgattgttttttatgaaaacgctttctcgaatatttttttcatgctaaacttattgtaaacacaagggtttggaggagtagcaatggcactattaaagaatttttttatcggattatctaataatagttttttaaacaacgcagcaaaaaaagtgggcccacgtttgggtgccaataaagtcgttgccggaaatacaattccagagttaattaatacaatcgaatacttaaatgacaagaatatcgctgttacggtagacaatttaggggaatttgtcggtacagttgaagaaagtaatcatgctaaagaacaaattttaactattatggacgcgcttcatcaacatggcgtaaaggcacatatgtctgttaaattgagtcagttaggtgcagaattcgacttagaattagcttaccaaaatttaagagagattttacttaaagcaaatacttacaacaatatgcatataaatattgatactgaaaaatatgctagcctgcaacaaattgttcaagttttagatcgattaaaaggcgaatttagaaatgttggtactgtaattcaagcatatttatacgatagccatgaattagttgataagtaccaagatttacgattacgtttggttaaaggtgcatataaagaaaacgaatcaattgcatttcaatctaaggaagacgtagatgcaaattacatcaagataattgaacaacgtttgttaaacgcacgcaatttcacttcaattgcaacacatgaccatcgcatcattaatcatgtaaaacaatttatgaaagaaaatcacattgaaaaagatcgtatggaattccaaatgctctatggttttagatcagagttagcagaagaaattgcaaatgaaggatataatttcactatctatgtaccttatggcgatgattggtttgcgtattttatgagaagattagcagaacgcccacaaaacctatctcttgctgtaaaagaatttgtgaaacctgctggcttaaaacgtgttggcataattgcagctttaggagctacagttatgttaggtttaagtacaattaaaaatttatgccgtaaatagaacatggcataaacaataatttaggagtctggaacaataatcaatgttctaggctcctaaatgttatataggcagttctgaatcatttataaatctttgattatgaactcactacagcgctctatgcttttatagattttaataaattagccatttcaattgcacttactgctgcttcggcacctttattgccagctttagtacctgctctttccacagcttgttcaatactttcagtcgttaaaataccaaatatgactggtacattagtttgatcatttactttagaaacacctttcgcgacttcattacaaacataatcataatgagacgtagcaccgcgaattacgcatcctaatgtaattactgcatcataatttcctgatgaggctaattttttagctactaaaggaatttcaaacgcacccggaacaaatgctacatcaatattgtcttcattaacatcatgtcgaatcaaagtatcttttgcaccttcaagtaatcttccagtgataaaatcattaaatcgactaactacgattgcaactttcaaatcttttccaattaatttaccttcaaaattcatgttaaagtcctcctatattaaatgacccatttttatttttttcgtttccatataatcatgattatgtaccgtttctggtacgataacttcaattctttctgcaatatcaatgccatattgttttaatccctcaaatttacttggattattacttaataaattgatatgttcgatgttaaaatattttaaaatctgtgcagcaatatgataatctcgcaaatcttcatcaaaacctaatgctaaatttgcagttactgtatcatatccttgctcaattaattcatatgcgcgtaatttgtttaacaatcctatgccacgaccttcttgaggtagataaataatcatgccgccatgttcattgatatacttcatagacgattcaagttgagcaccacaatcacaacgctgactatggaaaatatcgcctgtaaggcacgcagaatgtaagcgtacattttcatgttgtcgaattgcaccttttgtcagtacaactatctcttcatctgtgtaagtcgctttaaaaccatacatatcaaatgttccgaaatctgtaggcattttcacttttgccttaaattcaatttctggttctaattttttacggtattcaattaaatcatcaatcgtaatcatctttaattgatgtttttctttaaacttttgtaaatcttgtcctttcgccatcgtgccgtcatcattcataatctcacaaatgacaccagcgggcttggcaccagtaagtttagctaaatcaacagccgcttctgtgtgtccatttctagctaacacccctttatcttgtgccactaatggaaataaatgaccaggacgattaaaatctttagcttcactactaggatctatgagctttttggcagtcaatgtacgttcataagcgctaattcctgttgttgtatctacatgatcaatactcactgtaaattgcgtaccaaagatgtcggagttatcatcaaccatttgtaccaaatccaaacgttgtgcaatatctttagacactggtgcgcatattaatccccttgcttctttcgccataaaattaatggtattatcgttcatccattcagtgaccgctactaaatcaccttcattttcacgattctcatcatctactacaataattgtttctccattttttaaagccattaaagcactgtcaatattatcgaattgcatgctacccctcctaaaaaccaaatgctcttaatttatctacagataattggtctttatctttatttaaaatattttcaacatatttaaacaaaacgtctgtttctaaatgtactttatctcctaattttttggatgataaaatcgttgaacgcctcgtttctggaataagatgaatgtcaaaactgttatcatgcttatcaaataccgttagacttacaccatccacagtaatagacccttgcttaactaactgattattaatatgttggctacattgaatagtaataattttggcattggctgtttcatttatttttgaaactgttcctagttcatctacatgaccgaggacaaaatgtccaccaaacctaccgttaccactcatggcacgctctaaattcacttctgattgtcgcttaacatctgctaaataggttttattttcagtgcctttaattacttgaacagtaaaagatgtctgatcaaaatcaatcactgttaaacatgcaccattaacactgatggaatcaccaatatgcatatctgccgtaatcttatgcgcttcgatttcaatcgtcctgactgattgacgaatttgaacacttttaacgacacctatttcttcaacgatgccagtaaacatgcatcatcacttctttcgtaaagttaatttaacattttgatttaataactcggaatgaacaatttcaaattggttcgcatctggtatctcaatcacatcatttgtttgataaaattgataatttccagatccgccaattaatttcggggcataatagagaataaattcatctatataattagattggagaaattctgatgtagtggttggacctgcctcgactagcaaagtaccaactcctcttttatataaattgtgaagaattgttgttaaatcacaagacttcaagtaaataatttcaatatgtgtttgattggttgttaaatttggattttctgtatatatccaaattggtgttgattcatcttgataaatttgctgattaaaatgaatattcccagacttagacaatattacttttatagggttttttccatcttgaatacgtgtagtatattgtggatcatctaattcaactgtacgtcttccagttaacactgcgtcgtgtcgatgtcttaacttatagacatcttgtttaacctctttgttagtaatccattgactttgtccattatcattcgcttgtttaccatctaaacttgcagatactttcactgtaatttgtggcagttgctttgcttttgctttaaaaaagtcttggtataattgtgatgcacgttcatcatcaacgcattcaacctcaataccgtgatcccgtaacgtatcatcaccatgtgtatctaacgaattgtcttttgttgcgtaaactactttagctatcttacaatcaattattttgttaacacagggtggtgttaaaccaaaatgactacatggctctaacgtaatataaatcgtcgcaccttcagcattttgttgtgccatatcaagtgcttgaacctccgcatgcttgtcaccttttctcaagtgtgcaccaataccgacaatcctaccttctttaactacaacagcgccaacgggtggattaacacctgtttgaccttgtaccatatttgcaagttgaatcgcataatccataaattgactcaaatgatcacctctataaacaaaaatcctcacatcatgaattaagatgcaaggagaaaaatttatcgttaaataagcctatttgtacacatttttacaaatacgctacattatctttgtcgataattaacattctttctcccatccagactttaactgtcggctctagaatctcactagatcagccactaatatgaaacatattagcaggtcgcaggctttatttactgccggttgggaatttcaccctgccccgaaagaattatatatgaaattgttatagattatttgagtacgtagtatgtcaactacatttaaaatgatactatatgttttctgaaaaaacaattaatgacggttttaatttaatataatctgactactataggcatctcattgatatgattcttactaacagacattaaaagcaaaccttcaattcgtctctatagagcgttctctttattatcttctagttacaaattattaattgtcactgtgctgttgttgctcattcgattctaaagcatcatataattgagatactgtatgcgcaacttgttctactatcattttcacaccatttcgtagtttattaacaccgtttgtcatttgacctatcgcaatcatatttgttaatgttccaaaccttggactaataacttgattggtttcaggtatgatttgtatgcctcccattggatgtgcttgtacaatttgtctattttcaagatttttaattaattgatcatcttgatccaattcatttaaatgactttttgcacctgtcgcgttaatgacaacattatatatgtctactgattcttggtttttgtatgaaaaataatacaacttgccatcatgtttcacatcttctaaatcttttttcaaaattaaagacttattttctattaattcaataattagttcagcagttcttggaggcattggatttgaatttaattgaatcatctttgagtatttttgattaaattgatgttggtcttcaatacttaagctattccatatccaatttaaattctctttcaaatgttcaatcatactttggaaaatgcccatttctgttggacgcgctaaatcatacttcaaatctgcaatatgatttcctgtacgtctatgtactaattttttaaaatcaatgtcatattcagcacattcttttaaaaataaagaaactaaagtatcaagcggtgcatttccgaaatgatgttttttaatgtcatttaatttgtctttagttaagtacttgaatgtcacgtctatcatagtacctcttacacttggtaaatttgcagaacgactcgtcatagtaattggtaatttcggatgatgagcagcaacataacgaacaacatctaagctggcaaggcctgtaccaataatcgcaatatcgtcctgttcatttacttcgtctaacgtattatatgttggataaggcgtagcgatatatccttttttaccctttaagttatatggatcatggtaggcaaatgtaccacatgttaaaaatacataatcgtacgcttgccatgattgttctgaatttgtagtacatatgtaataagttaaattcgtttcatcaatattagaatttgtataaatctcttgaactttattataaatagttgatatatttggatattttttcgtgaacatagataaataagatttcatataatgtccgaatacaaatctcggtaaatatgtaggctcatcaaaattaaaatcagtttgttgtttataccacttccaaaattcagtctcatcatctaaatttaaactcatctttttcgaaggcatattaattagcagctcagaactatcattttgaaatggtacgccctgtcccatatttactttatcatcgtataaatctatatctaattgattaaatttcgggtgcttaactaactctctcaatacacttacaccagcagttcccatgcctattattgctactcgcatatatcatccatccttttgtaattcaaaatattatatttaaactattacctataattatagcaatttggtatttttaataaaatttattaaggtaagctattatttcactttcacaaccactaaaccatttaaaacttttcatttaatatcaaccttagtgtttgtgttaaaatatttttaacgaggtgaattaaattgaaatttatagcaaagatattaatctcattagtaattctatttatgatttttagtcgtaaaaacaaagcttcttaatcaatacccttgattacaaaataaattcaactaaggtgattggccatacactcaagatatggctaatcacctttttcaatgcaaaacaaagagtataatttgcaaaatcaatatctatatttatctttaatacccttttaatactaaaaccaaatttagattacatagtcatatcatgtaatataccagagaaacatagacattcatctatatagatgataatctatttaacgtctaggaggtatgttatgacgtataaagaactagcaacatatttaaaagttttatcagattcaagcagattagaaatactagatttactttcttgtggagagttatgtgcttgtgatttgttagaacattttcaattctctcaacccacacttagctatcatatgaaagcattagtaaaaaccaacttagttacgacacgaaaaatcggaaataaacatttataccagcttaatcataatatttttgagtccgtaattaataacttgtctaaggttcatacctctaaccaacgatgtatttgtcataaccttaagactggtgaatgctaatgatgacaactttagcgacactcatttttctagtaactttattatttgtattatggcaacctaaaggcctagatattggcattaccgcattaactggtgcctttattgctattattactggtgttgtaagtttttccgatgttttcgaagtaacaggtattgtttggaatgctactttgacttttgtctcagtcattcttatttcatttatattagataaagttggattattcgaatggtcagctattcacatgcttcatgcttcaaaaggcaatggtttaaaaatgttcgtttatatcatattattgggtgccattgttgctgcatttttcgcaaatgatggcgcagcgttaatcttaacgcctattgtattagcgatggttaaaaatattggatttaataagcgcgcaatatttccatttattattgcaagtggttttattgctgatacaacgtctttacctttaattgtaagtaatctagtgaatattatatctgctgattattttcatgtaggattcgttcgatattttagtagaatgattatacctaatttattctcacttttagcaagtattatagtattgtggatatattttagaaaagcgatacctaaaacgtttgatgataataaaataaagcgtcctaaagatgccattaatgatttaaagctatttaaaatttcatggattatgctagttatattacttttcggctatctaatcagtgaatttactaaaattccggtatcaattttcactggaatcattgcttttatatttctaatgttggctcgtaaatcaaatgctgtaaatattaaggaagtcattaagggcgcaccttggaatatagtattattttcaattggtatgtatatcgtcgtattcggcttaagaaatgctggcattactttaatattggctaaaatattagaatatatttccaattacggtctatttagcaccattttgggaatgggcttcatttcagcatttttatcatcaataatgaataatatgcctacagttttaatagatgcgattgctattggtcaatcaaatgtccatggcttgttaaaagaaggcctaatttatgcgaatgttatcggttctgatttaggtccaaaaattacaccgataggctctttagctacattactgtggttacacgtcttaacacaaaaagatgttaagatttcttggggcacatactttaaaactggtatcatcattacaattccagtactatttataacactcatagggttgtatctaacacttatcatattttaattaattaggagattgttatgactaaaaaaacaatttattttatatgtacaggcaactcatgtcgaagtcaaatggctgaaggttgggctaaacaaatcttagcggaagattggaatgtatattctgctggtatcgaaacacacggtgttaatcccaaagcgatagaagctatgaaagaagtaggcattgatatatcaaatcatacatcagatttaatcgataataatattattaaaaattcaaatttagttgttacattatgtagtgatgcagacgtaaattgcccttctttaccaacaaatgttaagaaggaacattggggatttgatgatcctgcaggcaagccttggtcagagttccaacgtgtgagagatgaaattaaaatcgcaattgaaaatttcaaatcacgatgagagtgggacagaaatgataaaaaacactaatgatttattatgcagtggctctttatcattagctatagctaatgtgtacttaaaaataggaatacatgagtaaaactcatgcataagaaatactaatttctaaagaaaaagtaattctttattgatgtcctgccccaacttgtattgcctgtagaaattggtgttccaatttctctatgttggggccccgccaacttgcattggcggaattatcaatcaatatctctctttaatataaaaagacgctttctatacaaaacaagatagaaagcgtctttttagtatgtccgagtcaaaaaaacaactcatagcttatcaaattacttattcaaatgtttactgtcatctttatacacaaagtatttgaagtattttccttcagtcttcatgttcttataaaagtcagcgataattgttgcattactttctgcccacttaatatcagtagcatattgatgttctcctggattttttggattccatctcatactatacaatgtattttgatctgtgcttgataagaagtgcttatgaatgaaatcagcaccgcctgaaatagctttttcaggtgtatcccaaccatgctttttagcatattctgcacctgttttaattgggtctttatcaagggctcctactccatagaaattgtagtattttttgccatcaatttcgactccattagctaattcacttttaactgcgccagtttctaataatgcatgtgaaattaaataaacttcgttaacgtgcttatctttagcagcttttaagaaatcatccgtatgtttcaataacgttggtctatctactaacatacgtttaattctatttttatcaatcccttgatactttgataaatctaaaaattgatatttttgcttttcattatcgataaaagtaccgctatccattgcacttttaatttcagttgcagatgcatctctccatgcatcattctttttatttgatacctgttgactcgtataattatttatttgtttctttgctgcatcgtttaatgtaacatttaacttttcaaccttaatgtctgatttaacatgtttgaaaaatatctgatcggatatcattgagaaaaataaaaatgagacaacagcaaatatgacaacaagtcctattattccaaaaatagaacctttcttgtgtttattcatatccacacctcttaggtcattgttgttatacattcagtttgactacgataataaagtttaacattattaaaaccgtttaacaattttatctatgcattgttacatattcataaataaacagtaatgtaaatgaaacgttttaaacgatttatcaatattactttacgttgatctacgaatcataaatgttttatctttttgtataacctttgaaaacctttatatcaataatcttattattcacgtattaaaaaacaaaaaattctcttgttcgtttacttagtttcttttttataatccatcataataaaacttgctgcatttgatctatttttataatagtactgatttaaatcaatcgtaccttcaatttgaccatcacgatacatcatttcattagtgaagttatttatcatcacgaaatcagcacgatctctaataacatctaaatcgtcgtttcgtgcaaaaaaatgttctaaatttaaatgtgcgtaatccattgttacctcccgattacaaattttgttctatctactatttagcaaagtaataatacatcatatcacattaaattaattacttatgtcttatatttaacacttaatttagcgattacgcaaatgaatgatttttctaaatattttattctaactttatccggaaatatttgttatacgtataacttggagaatgactacttgaaatttaatgacgtatacaacaaacaccacaaaatcatacaccatcttttaaaaaaatataatattagctataattatgatgagtattatcaactactcttgataaaaatgtggcaattgagtcagatatataaaccctcaagcaagcaatctttatcctcttttttattcactcgattaaatttttaccttatcgatttattcagacaacaaaatcaattaaaagatgtcattttatgtgagaataattcaccaacattaactgaacaaccaacatactttaatgaacatgaccttcgtttacaagatatcttcaagtttttaaatcataaagaaagactatggctcaaactataccttgaaggatacaagcaatttgaaattgctgaaatcatgtcattatcgctttcaacgattaaattaattaagacatccgttaagcgtaaatgccaacataattttaaatagtttattgtgaaatttcggtcgatgtgttaatgatgttgaaacaccctaacatcttcatataaatttattttaaccattaaattaacaacttattatacgaggagtactatatttgcaagacaattctactaaatatctactttatatccaaactgctacttcaaaccatctcgaaacaaattgtgtctttttacattgtgattacattcttaaagttccaattaacaaactcgtttcatattatgcgaaattgcatttatcatcacaaagtgtgctaattgagactgcaaaaaacatactaaatattaataaactggttcccatttacatcaacgcaaaaactatactttttccgttaaaacataaacgtgcaccgatacaaatttatatcaatgcacattatattgttggtatgactgccatagagaattcaacattaatacattttcaagaaggcattcagctagaagttgatgagccattttctctagtttcaaaaaaatgtcatgaaagtttagctttgaagcacttcattgaaaatactatttcgaattaaatttaatttctaaaagtttcttagtaaagtatgatatcacaatttttataaaatatatgctaacaatcattaataaaatcgctccaataattgttaaaataacaacagttgtagataaatctaccttaggactaacgaaaaattgtacgccagatagacttgttattagcccaaataaaaacaagcctaataaagcaacataagcaaacatcatcactactaatgtaacaaacatactataactttttgtttctttatttcgaaatacattttgtcttaagtaagcattagcaaaggtaacaggcttatttaagttaacgctgtcatcatcagatatagaagacaatcgttgatctaatgcttgtttctccttcttgttcaaaaaccataattgctttttaacttttttatcaaatgatgctttattcataattaaggatttctctcctttataatattgacgtaattttaaacattagcgtcaattgaaagtgtattttatatattttacagaaatatatgtatcaaatctacaaaaatccatattacaatttcatttatgttgatttgacgctaaaatacagtctgctaattttttcaaactaatgctttttaggtaagtacaatgataaattttaatcgtataaatgtttcatatataatgaatctagccttaaccatattgcattcaaaattaattttaaaaaatgaaaagaaaggatttagcatgcaaaaattcaaagactttttttacgatgatttatcggttacacgaggaaattattttttaactttaatggcagcattttttattactatcattttatttatcggcatagttgtcagtgaagtacatttactttatagcatgctgattgtattagtaggtttaattctattgaggctattcaaaatcaatttattctcttttaaaaaattaacattgtatcaagttatttatattataggtggtgcactattaatttatgggttagataatctttatttatattttcatgacgtaccggcaaatgaacaacaattagagcatgaaatacgaaatacaccattctatatttctattttcactgttaccatcatccccgctattgtggaagaaattgtttttcgcggtatgataataagggttatattcagaaaacacttgtttttagggttacttgtgtctagtttagtttttgcatcattacacgaatctgacacttggattggttatttaccttacttatattctggtttgatttttggcctaatttatataaaaacaaaacgattagaagtggtaatattcatgcacttcttaaataacttattagctctgctctttataatatggggataattttgagataacctttcatattattttcaaattatctatctaatatttattttattgaacttgagtcaccacttaaactcaaaaatacatgtcatcaagtgcaaaataatttagaactaatacaaacataacaacttttactttacgcttaaaatcaaaagtcacatacctatatataagtacaacttgtatattttgtactctataggtatgtggcttaaataatattttattcttgagttgcatatagtaattgtttttattcattttctaaaatacgcgagactaatttcctttactacttctgttgaatcaatttagactttttataactcgagcttttacttagctgaattttgacttcaacttcattaataactatgatggaaaacccccataagcacaatgcctatgagggtttaaatatatttatatattatagaatagaaagacctgaagattgaatatctttcgcaaagcctttaactgtatctactgataattcgttaatatcgcgacctaagtttgtattcacttttttcacaacatctgctgggcatgtaataatatctgcaccaatttcatcagcttgaatcacattgaataattcgcggcaacttgcccataataatttaacgccgtctttactatgcgtaacttttacagcctctttcattaatggtaatggatctacgcctgtatctgcaatacgtcctgcaaatactgaaacatatgttggcacaccttcagttactgcttcagttatttctttaacttgttcaattgtgtaaacagccgtaacgtttaatctcacattgtcagctgaaagttttttaattaaaggaatcgttgattcaccttttgtatttacaataggaattttaacaaatacattttcgccatattgttttaaaattgctgcttctttttccatagtttctaaatcgtctgcaaatacttcaaatgaaattgaagcatctggaatttctttcacagcttcttcagcaaaagctttgtaatctgttacgcccgctttcgccattaaactaggatttgttgtaaaaccatccacttgtttgtttttataagctgctttcatttcttcaatatctgcaccgtccgcaaatacttctacatttagtttagccatataatatagcctccttgattcttattaaaatttaacaacatctgcatgtctttttcttacaaccatttgtaaaaaatgatttttatttctttgttatataaaacatttatatcacgcttttataatatatagctaattttttgcctatattttttaaaaatgactttagcaacattgtgtcaacaaggtaattaaactattgttttatgattgtttatgatacgatatgtaaatgataaccatccaggaggtctagcatgtctcgttcaaaaaaatacttttacttatctagcttaatgattattttaagctttttctttaatacaaataacgttttcctaagcggactttttaattcttttattaaattaatacttttctgcagtgttattaactccattgtactaattttgtctataatttttgcagatcgttcaattaaatcactaaagcctgatgcagattggattagaattgcgagtaaaagtttgccatggattattctaatcgttattttagtacatatcttttcaattgttcgtacattcggctttatttaaaaaagattaaatgtcaatgtagccttaatacaaaacaatacaatgtatcacgccataataagtaattcaatttgatgacgttgttgcgtataaaaaatattagattttcgaaatcataactatacatctaatcgctatagttatacaacaagatataacatataatgaggtttgataatgcatcgacaatttttgtcgtcgcgttgccaaaacctcttttttaaattcaaactacttcttttcgaggtgaagcaaatgcaatatgtatatatttttatcggtggtgctttaggcgctttattacgttacctcatttcttttctgaatactgacggaggttttccaatcggaacactggtagccaatttgactggtgcctttgtaatgggattgctaacagccttaacaattacatttttttcaaaccatccgaccctaaaaaaagctattacgactggttttcttggtgctttaacgactttttcaacatttcaattagaattaatacatatgtttgatcatcaacaatttataactttactactatatgctataacaagttatgtctttggtattttgttatgttacgtcggtataaaactaggtggtggtttatcatgatatcaatcattttagtcatgattggcggcggtttgggtgcaattgctagaagtgccattacggattattataatcataaatttacttcaaagttacctatcgcaacattgatagtaaatcttattggtagttttttaattggtttaactataggcttatcaatttcaatctcatggttccctgcgttctttgttaccggttttttaggtggcttaacaactttctcaacgttagccaaggaacttacactaatgatgacgccaaaatttaatattaagctttttctcaattattcacttttacaattcatcattggatttatagcttgttatattggctatcatatttaaaaataaaatgcttcattcagcaaataggtaaattacgacaccttcctgaccgaagcattttttaattttcatgcaaattttttagcaccatataatgcctaccaaaattcaataatctttgttgccgtttaaataatgtgaatgtcaataaattctccaaactagtcgaaaataaaaacgttaagcaatattgctattacctaacgttgacaattcatctaaccttttcatcagttaagcgattttaatctatccttcaaaagtttttggatcaggtccaattctcttatcttgatttaaaccatcaattcgcgtcatttgttcatctgataattcgaaatcaaatatttggaagttttcagagattctgtttggtgttaccgatttagggattgtaaccacaccatgttgcacattccatcttaaaacaacttgggcaggtgactttcctaattcttgagcaatgtctttaattgtctcatcatttaaaatttgtgcattcatcaatggtgaccaagattccatcacgatatgttgtgctaccaaatataatttcaatttatgttgcgttaaatatggatgatattcaacctgattaattacaggtttaattgacacttgtgccaacaaagcttccaaatgttcaggttcaaaattgctgacacctatatttttaactttattatttttatataaatcttccatacctttccatgtatcaaccattacggcttcgttcgtacctggccaatgaactagatacaaatctaagtattttaaacctaatctagataaactagcttcgtaagcagctgctacattttcacgaccaaaatcctcaaaatataattttgaagtaataaataagtcttctctagcaataccagttgattccaatccggcacgaatgccagcacctacttgttcttcattcccataaacttttgcggtatcaatactacgatatccttgttcaatggcatacttaacactttccatgcaattttcatcattttccacacgaaatgtccctaaaccaatttgtggcatcgcgtttccattataaaatgttttaacctccataaatatcgcctcacctttttgatgtattataccctgttatcataacaaatctgagttgaatacatgagaaaaaacacttatagcaatcaaccactaaaattctagtaatatctctcaaatattaatcaaattgtaaaagtaattctgtttaatttatgacaaactaaaaaagccgaagtaacaacatatagtcatcacttcagcctaacatttaattgaatgattcaattttatccatcatttgttgtaagtcttccacgttgtattgaatacgaccatggaatacaaatttgttaaagaactcgtctaattgttcagcaccaacaagcactttgacagcactattttgattataatttgaaatcgttacatcgccttcatttttaggattaaagtataaaattgaagtcggtgtatatttagcacctaaatgtttttgtaagtcttcagccaattgtttaatcgcctcaatttgatctgaataatttacaaatgataatgaacgtttgtcatcattttgatccatcacaatagtttgcggtctagatttatctaaatctaatgtatcaaatacttgttccattggtggtaaatctttaaattgaccgccactaataccattataaacatgaccttttaacaattgagaatcaataatataaagaccagttcttgttaatactaaatgactaattcgttcaatattattaaagccatcctttggtaaaaagatatttgccataatgtgcatatcttctggtcgaattcgtttttctttaactaatctttcacgaataccaattaatctcatgtccgttacatattcactatgatttttcgagaacaattttaatgcgtcaatctcacgatcttttgtactaaccatgtgattataatcttcttgttgttttgtaattgtctttttattttgaatacgctctttctctaaagcttcttcatgagactttttaatgttttgttcttgttgttcatacttttcttctgtttgtcgcttaacttttttcttactacctaaggcaactaagaaaaggacaaaaaagattaatgcaatgactactgcaataatgagtccaatgactaccggtgaagataaatccatcacaacaacgctcctttttaatatatgaataactttaattataatagaaaagctaaagattttcgatacatattatcatttatataccgaaaatcttttatttagctatattcaattcatcttattattttactgcgtcttttaattcttccactttgtctaatttttcccatgggaataagacatctgtacgtccaaaatgaccataagcagcagtttgtttgtaaatcggttgtttcaaatcaagcattttaataatacctgcaggtcttaggtcaaagtgttttctaactgcttcgacaagttgtccttcagaaactttacctgttccaaatgtatcaattgcaattgacactggttctgcaacaccaatcgcatatgccaattgtacttcacattgatctgctaaacctgctgcaacaatatttttagccacataacgtgcagcatatgcagctgaacggtctacttttgtaggatccttaccactgaagcatccgccaccatgacgtgcatagccaccgtacgtatcaacaatgattttacgtcctgttaatcctgcatcaccttgaggtccaccaattacaaagcgtcctgtaggattgatgtagaatttagtttgttcattaatcaagttttctggaacagttggataaatgacatgagctttaatgtcttcttgaatttgttcaagtgtcacatcctcagcatgttgtgttgatacgacaatcgtatcaatacgtacagggttatcattttcatcatattcaacagtgacctgaactttaccgtctggtcgtaaataatttaacgtaccatctttacgcacatctgataaacgttttgccaattgatgtgataaataaattgctagaggcatatacgtttctgtttcattcgttgcgtaaccaaacattaaaccttggtcacctgcacctgttgcttcaatttcttcttcgctatctttatcacgatactctaatgctttatccacgccttgtgcaatgtcaggtgattgttcatcaatcgcagttaaaattgccattgtttcataatcataaccatattttgctcttgtgtatccaatttctttgattgtttctctaacaactttcggaatatcaacatatgttgttgtagaaatttcgccggcgatcaatgccatacctgttgtaacagttgtttcacaagctacacgtgcatttgggtcgtcttttaaaatagcatctaatattgcatctgacacttggtcagcgattttatctgggtgtccttctgtaacagactctgaagtaaataatcgtttgttatttaacatagtttgctcctttaaatttatattacgaaaattctctctctgtgagctaaataaaaaagaccttctaactattaatatagagagaaggcctaatacgtccattcgctcttatcgttcagacctatttgtctgcaaacggtttggcacctttcttttataaaaaagaggttgctgggtttcattgggtccatgtccctccaccactcaggataagagaatccgttaaaaataatagtacctaattaatgaattaatgtcaatttttcacaaataaatttacagtaaaatattgtagattaattatgttaatgtgttatactaattaaatgtaaaggcttacatttaaattatcgctttggagggatttaggatgtcagtagacacatacactgaaacaactaaaattgacaaattactgaaaaaaccaacgtcacattttcaactttcgacgacacaactttataataaaatcttagacaataacgaaggggtattaacagaacttggtgctgttaatgcaagtactggaaaatatactggtcgttcgcctaaagacaaattttttgtctctgaaccttcatatagagataacattgattggggagaaattaatcaacctatcgatgaagaaactttcttgaagttataccataaagtactagactatttagataaaaaagatgaactatacgtatttaaaggctacgctggtagcgataaagatacaatgttaaaacttacagtcatcaatgaattagcatggcataatttatttgctaaaaatatgtttattagacctgaatcaaaagaagaagctacaaagattaaacctaacttcactatcgtttctgccccacattttaaagcagatccagaagttgatggtactaaatctgaaacttttgtcattatttcatttaaacacaaagtcattttaatcggcggcactgaatacgctggtgaaatgaaaaaaggtatcttctctgtaatgaattatctcttaccgatgcaagatattatgagcatgcattgctcagcaaacgttggtgaaaaaggcgatgttgcattattctttggtctatctggcactggtaaaacaaccttatcggctgacccacaccgtaaactaatcggtgatgatgaacacggctggaataaaaacggggtctttaatatcgaaggtggctgctatgcaaaagcaattaatctttccaaagaaaaagaaccacagatttttgacgcaatcaaatatggtgcaatcctagagaacactgtagttgcagaagatggttcagtggactttgaagacaatcgttatacagaaaacacgcgtgccgcttatccaattaatcacattgacaatattgtagtaccatcaaaagcagcacatccaaatacaattattttcttaactgcggatgcatttggtgttattccaccgatttcaaagttaaataaagaccaagcaatgtatcatttcttgagtggtttcacttctaaattagctggtacagagcgtggtgtgacagaacctgaaccatcattctcaacatgtttcggcgcaccgttcttcccgttacaccctactgtttacgctgatttattaggtgaacttatcgatttacatgatgttgatgtttatcttgttaatactggatggactggcggaaaatatggtgtaggacgtagaatcagcttacattacacacgtcaaatggtaaaccaagcgatttctggcaaattgaaaaatgcagaatatacaaaagatagtacgtttggtttaagtattcctgtagaaattgaagatgtaccgaaaacaattttaaatccaattaatgcttggagcgacaaagagaaatataaagcacaagcagaagatttaattcaacgttttgaaaagaacttcgaaaaatttggtgaaaaagttgaacatattgccaaaaaaggtagcttcaacaaataaatttgaatactaattaaagagccaaccgttgttatattttaacaatggttggcccctcttattttaattggtaaaaaatttataggcaattttattacaacaatgcacatttaaggtgaccttcatgccaaactcgcatcactcattcaatggaagcagcacgtcttcacataaagtaccgatcccttacgctatgcatgttgccccactttgcattaaataccgattcctcattcaacgtatatcacacatcttcaaagattgatagttcccatgcgcacaccacgtatcatactagctatgcgactcaacttggttcataaactctttaatataagccaatgtttcaaccatcgctggaggtcttggcacatgtccttctgccatttgataaaatgtttcatgtatggccccttttaactctagttgatccgctaaataatacgcatgatgaataccaacttgctggtctttccctccatgtacaattaatattggtggactgttttcattaatgtttggaatcgcttggcgtgcctcatatgctgctcgatctttttttggatgaccaatcattcttcgtagcatacctcttaaatcaacgcgctcttcatacatcaaatcaatatctgagactccaccccagatgatataactatttacaggtaagtcttgaaatgtcaacaacccttgtagtccacctcttgaaaaaccaaccatatgaataaaagcttgcggatatttatcatgtagcaatcttaatagttgcgtcacatcatttaaatcgccacgataaaattcatctttaccttcactaccattgtcacctcggtagtatggcccaatcactaaagtttgactatctgaaaattgcattaatctacctgcgcgcacacgtcctacttgacctttgccacctcgcaaatatactacaatgcgttttacttcatgatgtggtgtcatcattaaagcttttacttgtaaatcatctgacaaatatgtaatttcttcgaattgatgcgtaaaagattcaattggcattcgtttacgtttgataaaatccaagtgattgcaccctctctacgcattttaaaatggtactatcttgcagtaagaaactccgttgtgcgagttcaatatcattgatacagttaaacaacactggccctgctgtttctaaataatcgttcttgcttaccaatgattcaacttcgataaaatatacatcttttacaaaatcagtttgatcatgtgtttcaatgctatattgtgctatgtaatgaatatttttaactttggcgcctgtttcttcatataattcacgggtaactgcttcagcactactttccccgcgttcccttttaccaccaggaaattcaataccccgtaaattatgtttggtaaaaagcaattgatttttaaacgttggaatagctagcacatgattgccatctgctatctcattattctttttaaatgtcaaattaacttgacgattatctttatccctaaacttcacgcgcatcacatccctacattgtatgttaatataatagttaattactatcgttggaggcattaattatgaaaaagatattcttggcgatgattcatttttatcaacgtttcatttcgccactcactccaccaacttgtcgtttttatcctacatgttcagagtacactagagaagcgattcaataccacggtgctttcaaaggcctttatttaggcatccgtcgtattttaaaatgtcatccgcttcataaaggtggctttgaccctgttccgttaaaaaaagacaagtcagcaagcaagcattcacataaacataaccattaatatggttgtaattgagttatatctactaaaggggggcgaaattcaagtcgcccctcttttaatatgcctgaatacgccaccacatcttgttcaaaataataacctgctggtgtaacatctcctggataatcacctttacgagcaagcatcgctgtaaaataacggcttaaaccatattcgtacatgccgccaataaccacttttacaccatgacttttcaaagtatcaattgccgtttgcactttatcaatgccacctagacgaaatggttttaatacaacaactttcacattgtataattctatcaaattaattatgtccgatagtgatgtcgccttttcatcaagggctattggaggtattgttccatccactacttcatcaagcattgagatatctttaaatggctcttcgatataaagaatatgttcgcgcgctaataactgtaactgtgtgaaatcttgacgatccaaggactcatttgcatctataaccaattgaaagtggaagtctaattcccgtaacactctaatttgatgcatgatttgaggtgtccattttaatttaattctggtcggctttgttgctttcaatgactctagttgtttatttgataagccgctcgctgtcgctccatatgctactgaaaatgaaggcagtacatgaaacatttgatacaatgccatgacaatagttgcccttgcagcaggcgtattttccaatgaatctactaatttaagtgctgcttcatacgtttcaaatgatttatttcttttatcttcgaaccattgctcaatcgcatgttttactgaagcaattgtttcatgatcataccaatctgtttgaaaagcgttacattccccgaaatatgcatttcctttatcatcaatcaattcgataaacaaacaatcacgatgcgttaaagtgactttcggtgttacaatttgtgacttaaatggctcactatatttataaaaatgcaaagctgtcaacttcatcaaatcatcctctatacaacttatttctttgtaatttacctgttgatgtataaggtaaagtatcaaccttttcaaagtgtttcggcactttatatttcgctaaatgttgtgataaatatgcaatcaattgtgcctttgaaatgtcactttcactgacaaaatataatttaggcacttgaccccaagtatcatcaggatgccctacacatactgcgtcactgatacctggaaattgcttcgctaccgtttcaatttgatatggataaatattttcaccgccactaataattaaatctttacgtcggtcataaatcatgacataaccttcatgatctatttcagcaatgtcacccgtattaaaataaccattttcaaacgtacccgttaaatctgttggatacaaatatccattcatcacattggcgcctttaatcattaattctccatgaccttctttattaggatttttaatttttatgtcaacattggcacttggcacccctacagtgtcaggacgtgcatgcaacatttccggtgttgctgttaaaaattgtgaacatgtctcagtcataccaaatgaattataaattggcaggttatattgtaatgccgtctctatcatagtggcagataatttagcaccgccaagtaatattttttgtaaatcataaggttcatgtaaaccttgttgcataagccaatttaaagtttgtggcacaagcgaaatgtgtgtgatgcgttcattttttatcatcgttaaaatttgttcggcattaaatttatcaacaatgcgcacagtaaacccttcaataacagctcttaaaagtacactgagacccgaaatatgataaatcggcaagacagatagccaattagtatcacgatcaaatcccaagctctctttacatccgattgcactggcataatgattacgaaacgtttgtggcaccgctttttgagggccagttgtccctgatgtaaacataatcgatgcaatgtcatctaaattaaatgatgtatttaatatgttgggcggcgaatctttcggcaccacagtttcattcgatgtatcatattggatgtccaatgtgttgtccattaaatcgttcattgtaatatccgttccagcgaattcaatatcatccagcgatacaatttgaaactctcgcaattccagtggcaaggtacaaaaaatcaattgtacatcgattgacctcatctgattcgtcatctcattaggtgtcaaccttgtattaatcatcgcaatttcaatatttgccaaccaacaagcatgtattaaaatgatcgattgaatcgaattatctatgtatagcccgacacgagattgttgataagccttgagtcttttagccaatagactcgcttcacagtataaattttgataagtataagatttttgaccgtctgttatcgcaatatgatgtccattttgttgtgcttgtttatataaccaaaagtccatgcgctattcctccaaaatcatttacattataattataacgattttatgacattctagcagtggttatgtttaaaaatataaaaaagtagacgaattgattcattgatatgattgttataatgctcaatacatatcgttatatcattcgtctactattatcagttatttttatttaattttagtgtcattctatcattttgatgtggtgatttacccattgttgccacatcatctgcaatgtcaattggtatacgattcatgtcttgtaatgcacttaaatggaatacttcatcatctaaattttcaatgagatatacataatatgttaccttgtcctttttatattttaacgttttccaaaagtccggcttgcaattcaatacattatccggaatatattcaataaataagtaacgtttgctgcctactttgtctacaaaatattttacagtgcctttttctatacctcttatatgtgcatagtctgctgaaaagtaaatactacctattgtttcattatgttgttgtatttcaaatcgttggcctactattttattatttgtgccacaactacttaaaaaaatcagtagatatagcattaaacaaattttcatccccttgaattttacaaactttttcaaaagcaacacctctaaaaataaatacaatatattatagcaaatagaaattattattttattaaattatgttgtcatgttcgtgtcattttgagttgcaatacaactttacaattattaaattaacacttctacaacccaaaaatatttttaaagttttgaaaaaaattaaagtatttctactactaatttggtaaaatattattatgtgatatagtgaaagcgttttacacttaataactccctcttaaatgcatccaggttttatgtagtaaatcatgaaaataacatataaatatagaggagatttacctttgaatacagagaacaacaagaatcaaaaccaatctgctaaaaattctgaaagacgtggcatgttaaaaggatgcggcggttgccttatttcttttattttattaattatcttattatcagcctgttcaacgatgtttagtaataatgacaattccactagtaatcaatcatcaaaaacgcaattaactcaaaaagacgaagataaaagtgaaaatatgcctgaagaaaaatcagaatcagaaacagataaggatttacaatcaaccgaagaagtactcgcaaatgaaaatactgaaaataatcaacatgaaattgatgaaataacaacaacagatcaatcagatgatgaaattaacacaccaaacgttgcagaagaagaatcacaagatgacttgaaagatgatttaaatgaaaagcaacaaccaagtgaccatcatcaatccactcaacctaagacttcaccatcaactgaaacaaacaagcaacaatcatttgctaattgtaagcaacttagacaagtatatccgaatggtgtcactgccgatcatccagcatatcgaccacatttagatagagataaagataaacgtgcatgtgaacctgataaatattaaacaacaagcgaattgaattcaaattgtatttagctttatgtactaatcacatagtaaataatgagggagattttttaggcatgagcaatcaattcaaaagcgaagaagagcgaagacaatgggaacaattccaagctttccaaaatcaacaaaaccaacagaaccagcaatacagacaaaagaaatctaaaaaaggatggttctggggctgtggtggttgtctagtattatttattttaattatcatcggtatttcagcttgtacagctggtattacaggtaaccttggcggaaatagttctaaagaaacgaacaaaacccataaaatcggtgaaactgttaaaaatggcgaccttgaagtcactgtaaattcagtggaaactatgaaatctgtaggaccatctcttgcaccaacaaacgctaaaggtatatttgtcgttgctgatgtgacgattaaaaacaaaggtaaagaagcattaacaattgatagttcaatgtttaagctaaaatccggtgataaaacatttgaagcagataatacaggttcaatgtctgctaatcaaagtgacaatggtagtatagaaaattcatttttcttacagcgtataaatcctgatagcactgctcaaggtaaaattgttttcgatgtgtcagaaaacatagccaacgcaaaagataaaaaattagaagttatttctagtttatttagcgtcaagaagattacatttgatttatccgatgctaaaaaaacatcaaaagctaaaaaagacaagcaagatacagaagtagctgttgcgagttcaaatagcgataatgtaaattatgaagcttcggctactacacctgctacaacttctagtgcggatactgattctgaagatagcgaaaagtctagtaaagatgaggataagcagaatgcgtctaaaagtgataaatctagtgtagaaaaaagtgaatctaacgaggaaactgctcctgtagagcccatgccccagagcaaacctaccactagtgaagcatcacctagtcaaaatattcacaatgaagatagcatgaacgacgcttcaacagaataaaatttcagggtagctcggctacccttcttttacggaaaaattaattatacataatcaaatcaaggagataaaaaaatgaaattcaaagctatcgttgcaatcacattatcattgtcactattaaccgcctgtggtgctaatcaacataaagaaaatagtagtaaatcaaatgacactaataaaaagacgcaacaaactgacaactctacacagtcaaatacagaaaagcaaatgacaccacaagaagccgaagatatcgttcgaaacgattacaaagcaagaggcgttaatgaatatcaaacattaaattttaaaacaaatcttgaacgaagtaatgaacatgaatattatgttgaacatttagtccgcgatgcagttggtacacctttaaaacgttgcgctattgttaatcgacacaatggtacgattattaatatttttgatgatatgtcagaaaaagataaagaagaatttgaagcatttaaaaagagaagccctaaatataatccaggtatgaatgatcaagctgaaatggataatgagccggaagacattcaacatcatgatattgacaataacaaagccattcaaaatgacataccagatcaaaaagtcgatgataaaaacgataaaaatgctgttaataaagaagaaaaacacgataaccgtgaaaataattcagcagaaattaaagttaaataagggtatactttgattattcgtaatttttaggagaatcgctatgataacatttgaaaatatacaacaacttgaaaaatacaccttaatgactatgcatggtctttttaatcaacttaaactcggtattatttcaatcgacaatgcagagcatacgctctttacaccttatatgatggaaacactctcttccctaggtgtgaaaccagacattatcgatttaattcacaaagggacagagttagaagactttgcagcatttaatttatcaattgatgatacagttacagtctgtttacaaagaactgaagaactattaaaacaatacaaaaatgtagaattcaatgacaaaatattaatcaattggcgcattatgcaaaagtaatagacatataaaagtcgaacgtaactatgtgggtattgattttattctttctaagttacaagtatttcattttataaagtttgaaaagaggtttattgaaatggagaaaaacgaatatacagctaaatataatgaatatagtcaattattagacgctacttactcgcaagctgtagcataccttttaaataaatatggcgctgtaaccgatgactattataaggaaaaatcatacatgcgatttttaaatggagaaatcaaaagtatttcaaaaggaaaatacactagagctagtgaaggattatattgtcatcacataagcgaggacaaattccaaaacttatctgacctaagattcatttccgaatttaagtactcatacaactatcaaaagaaagaaaacttagtttactgcgatttaatcgagcatttaattttacatgcaattattacaaaagaatccaatggccaatttggtgtggctggattatgtcaaatgatcaaaccaacagtcattgattggtacattggcgaatataatccaaaaccagcatggatgcaagccaccaaagcacgtgcctatttgcctggaatattagtagagaaattactcattaaaattgacgatatgttaaaaggaatagaaatatatgatttccttgagtctagataaatgattaatggatatttattttttgctgttgagattttgttatagatatttaaacctgtaattaaatatattttataaaaataaaccacgcatacctatctataaacggacaatgtttataaatgagtttgcatggtcttgaattgtattcccttaattagaattaacatttaagttttaatcaattatatatatcaattacccattattttttaatagataatatattttaagcctttgttaaatcattaaatataatacctttttgttgtatctattttgaatttttgtaactatagatttaagtactttacttttcaactttttattcattttcaagtaatagcagtctagaattaaatggaggttttttaattggctacgggaattgttattttaaataatgtaaaaaaagcaattaacggaaatactatacttaataatctaaatttaactatacccaaaaattctattacattaattgatggatataatggctcaggaaaaagtgtaacattgaaattaattgccaatttatataaaccaactagtggaaaattaatatctaatggcgtagtgagttttgcaccagatcaatttcctatctctataaacctgactttagatgaatactttaattatttgaaaaaaatttataaattaccttcaaattcaaaactaattagtcatctcgtttcaaatttcagtcttaaacaatttttaaatttcaaagtaaaaaattgttctaagggtactcgacaaaaaattaatataatccaatgcttagttaaacctgcggatatttacattttggacgaaccattttcaggactagataaagattccattgactttttagctaattatttgtgtgagattaaaagtaaagcaactattattatctcttctcatgaatacgatataaacaaaaaaattattactcatacattcgacttaaaatccaatgctttttctaagcaatattttaataaaacaacagaggttactattatcgacttttcaaatgcagactttgaaaaagcaattcaaacattaaactttagttttcaaataacaaaagaaaatgaaaataatagagcaaaaattattgtacctttttctaaaaccaatattacattgttaacactaattaaaaataatttaactgtttataaagtaataagtaaggatgagaatctatgccatttataaaatatcaaaatataaaattatttcgatcttattcgttcatccctccgtacgctttttttatcattgtgataatgcttttttatttttataaaaaccagatgatattgcctagttatgctagttcaatgatattactttatgccactttatcctggctaacaattataaatttcaatttagattctatacaagaaaaacatatgctttttattcaattagacagtaaattaaaatatctaaattacaaaatgttattttctttcctgtcatcaatcccattggttatgttttcaattttatatccaattattactaatagtttttcagaatcatttgatctttataccataatactcagcatttatttacatttaattatagtaatgattgatgtattagttgcttcatttattactgttcaaaagttcttttcacaaaaatatagttggttattattagtcttgatttatgttatatcaataattaaatttgcgatagttcaaagctatccagtgctaaagttcttgctgttttttataccgcctgttggaaatttcctaaatctatttaataagtcgacatctgatatatggtcaaaagagtttattttattaaatttagagattgttctgtttatctgtatagcaatagttttaatcaattatatatacaaaaaaagcgagtattattaattttggtattcgtaatactcactttttgtatgttatgtaatgtttttttaatactcttgtcctttaatgattgtgaggataataataatttttattacaccatacaaccgaatctaatccagcgatcctgaaaagaaaaacaacggcggttcggcttcatattcatttttgtctaagtgttctttttcaattatttcatccactgttaatcggtctttagcatctttctctttcaataatcgccctattttttcttccttatatcctatgctactattaaactgatttccttcatctcctgtatttatatatgcctgaaatttatattgtttatcattatttatatatcctttaataaagtaagcattcaccgggcttttttgaaactttgttattttcatagacttatagtgattcaggttatgcttaaaatacaaatcgattcgtttttcttgtgtctcaatataatgttcttttttacttttgtgaaacgtgtatgcaataacaattagtactattaataatgcaacaactaccacaaatacatatctctttttcattttaacccccatagtttagtatttatttcttatagattttagatttcaaaaaacaattaactttgacatgctatcttttttctatgttccgtttacgcccctcatgaaacgttgtttcaaaatacttttaaaaattatttgcttgacataattataaatacataaaataaccctgttatatatgggtttataaaatgtaggaaaatggcgaaatgaaaatgctgtttttcctaacgtcaaaggtgttaaatcatactcgcgtataatttcatttcttggcttaccattttcatataatctaaccatttataacttaaactctgaactaaatgatcttctttcttaaattaacaaaatctactctcatagaatttgtccaattagatgatataatagtagagtcgcctatctctcaggcgtcaatttagacgcagagaggaggtgtataaggtgatgcttattttcgttcacatcatagcaccagtcatcagtggctgtgccattgcgtttttttcttattggctaagtagacgcaatacaaaataggtgacatatagccgcaccaataaaaatcccctcactaccgcaaatagtgaggggattggtgtataagtaaatacttattttcgttatctcaattatactgctgatttttctttttgtaaaatatgcaaggttttaaagagaaacatcaagaactaaagagtgctctatgtcaaattggactgatgcgttcaatatcggaagttagacaactaaacattgcttaacttaacttcctttttactttttggagcgtaaagttttgaacataataatattcgattgcgcaaatgattgtaacttccataaccaaaagatgtacgtttaattaattttattttgttgtttataccttctaatggaccatttgataaattgtaataatcaaaggttacactattaaaagtgtcacaaattcttatgaatctggcataaactttgaattaactaaataagtaagaaaacctcggcactatatcattttaatagtgtcgagatttttatagatactacaaatatttataacatggttaatttcatctaatgacttatatttttgtttcatctcagtatgaacaattatttattggacgtattttgctctttcttaatttcggaaactgacttaggatttttaataaattttctacccaattcatttgtataagaaatatcggtatcaaattgaaaatcatcaatagatcttataccagctgtaaatgataactttttatcattatttatataaccactaatagaataaccatccattgggttttctttaaaattagtaaagcttatatttttataacctttcacattgtgcttcatataaatcgttattctttctttttgctcattatagtattgttctttttcatcatgtcctattttcaaatataaagcaaatactataattattaatattactgtaactaaaactttaattttcatcttttttatttatcttcttctttaattctgaaactgttttttcatcttttatcatcattctatccagtttatcactatatgatgaaatgtattcaaattgataattatcttcagaccacatatgcgctgaaaaagtattagtcttgtcattatttatataacctgtaataacaaatccatctaaagggttttctttttgttcctcgaattgtatttctttaaaccctttaacattatacttcatataaattattattctttctttttgttcatcataatatttcttttcatcgtatttcatcttcaaaaagattccgcctagaatcaacattataattatatatacagtcataagaggttttttattcaaaaaatcaatctccttttcattggatttattgacgattattttaaattaatgaagcatactgagtttaacgatgattgtaaaatcgtagcaacccaaatgactgttggttttacattagtagatttttctttcttataatcttaaatcatgatttgatttactttaaaatttaaataattatatttttatccattctattcataacatttattcaattggacctgaaaagaaaaataacggtggctcggcttcatattcacttttatccaagtgttctttttcaattatttcatcgactgagagtttatatttagggtctttttctttgaataattcacctattttatcctctttataacctaaatctcctttaaattgtttattagtatcagaaaatatcacggcatcaaatttataattttttttattattgacaaatccttttataaaatatccacccattggattctttttaaaacttgtaactttcattgaatgataattgttaagattatatttaaaatacaaatctatacgcttttcttgcgtctcaatataatgatcttttttacctttgtgtaacaaatagcctactattattaaacatgttataattaatataataattagtttgatatattttttcatttttattattacctcttttttattatttttaaggagtgttatacatgttattaagagatagcgaagcaagaatattatccgaaaattcatatgataacttatcagtaaatgaagtatatacattttcaaataataaacaatacaaagtcatcgaaaaacgcgacgatacccagaatgggtttagagcatatgttttcgctccagtaatcaaaggtaaagttgataagagtcaacttttaataggttacgctggcactaacccatttagtctaaatgatattcgtactgatttacaacttcccattcatcataacacaaataatctaaaaattaataatcattataaagatttaaataactcaactattaacaaaaattacaatacaataaatgataaaaatgacctatttagtttttcttctgtgttatatactaaagcccttatcggtggtcgaacacctgctaaatttgcaccgtctcaaatggacgaaagtgatgcttttactgaatcagtaaaaaagaaatatccagatagtgagatacacccaataggacatagtttaggtgcatttttagctcaatataatttaataaaacataatctagcaaacggtacaacatatgcagcacctaacgtacaccattcatttactggcgactttaaaaaagacattgataatggtgtctatgattcaaaaatacgcaatattggccattttgatgatcctattaataatttgaatttttttaatcctcgtattggcaaaaatattacatcaatgccacattatgatggatttataactgaccttcctttcattggtcaacacacacttgaatcttacaatgattttgatgcagatggtaatgtgaaggaaatgccagaacttgaacaatttaatgatgacctatctcttaataacagatttcaattatttgacccatttggtataaaaagcagatttttcgactctattaaaatcgatagttctatattaaatagaacaagtgaaaatgattttgatcctttttctattctcaataaaaaagataaattattcgaatcaaatgatcttgatatagaaggatttaataataaacaaaaagaagatttaagcattgatttaaatccttttgatgatgaactaaatgatgaggacgaaccattaattcccaaaagaggcgatagtaaaaaattaaaagcagaaaagaaaatctctgttaaaaaaaccaaaagtggttccaaaaatccaggtaaaaaagtaaagattcagcctgatgaagtgcgtaatatcgctagcacaattcgtgatagactatttttatataatcaaatcattaatgccttggatgaatatagagaagaaacaatatcaggtgctaatcgcattttagataaatatcaatcggagcttctaagcggttcacatgaatttataacaccttatgatcttgaacaatatatggaaattttatcagttgaaggaagttcaggtaatttcaagttttataatagtggtttaatggatgacttaattcaggaattagatcaaaacaagaaagacttgctacaatttgctgaaaaactagaatttgctgcaaataaattcgaagaaaaagatttagaagaaagcgatgtttttggactatttagttaaagagggtaatttatatgagctcaaaagatgcaaagaaaagtcaagaagaagctagattacaacaattaaagcaagaaatgcgtaatagtactgataatatggttagcaatgctaaaaataatgtagcattaaaatctcaaacattaaatgaaatcattgaaacaattaataactcttctcaaaatttagaaggtacattcgaaggaaaagcaagcgaagcagcccaacaaagtataaataaactcaaaaacaataacgaaaatcttaaagaaaaatttgagacccttttaaatacaatgaagataaatggatgatattgagaaattattaatttatctgtacttttttatacataacgaaaatcccctcgctaaactaatagtgaagggattttaatttagttgtttgtatttattaaaatgattattactgaatttttaatctgctgtttgatattaaataaaactttaaaaatatgagtaattatcattatgtcactgagcaatatattattataaaatcttctgatttttctattgctaatctaaatttaaacaaataacttttgaagaaatccttgtttacgattttttagactttcaatctttttttcagattgttcaatacgtcgatttataatatgtataaattgactaattttatcctgttcaaactttacaggtaatggaaatgggattaatttcaattcttttacaggcactaaattggttattgccgacccaggatttgcctctaggatttttctttgcatttgattgctcctcataaatatcaaaaagaattcacttctaattttatggttagttctaaatctaataagcgcttggtttataattccctttgtataattatgaggaatgagtgctaatcttccaatagtacctgagcaactcattattatatcatttggttgaaccgaaaatgattgcatttctttatatttattttcgtttatataatatctaaagttacttatatcataaattgcattcctttgttcataaactgcataaccgctttctacaaatatatctttctttaatgctcctccaaaaggtcctctctttataccttcagttttgtctttcaaaactttttgaagcattacattttcccactccggataatcattaccattctcatccttgaatcgcaattcctgtgagaaaattttctgcatatagccttttttctgttgttgaagtaattcaagtttttgttcttgtagttcaatttgtcggtcaagtttgctgaagaacttgcctattttttgctgctctttatttgtagggacaaatctatttattttattaatggtttgtttacttaagcttggcacacctgttgattcatcgtatactttccaatttatttttctaaataaacttaatataaatagtatgtctgtttcttttttaggtgtacaataaaataatgtatccaccgtccaaaacggcgcctcaagcaaatatggtttgtttatagtcccttttctcccaataccaacagcatcaatttcacttagtggttctgaaacacttgtcatataaccgccagtaccatagactggtatatcgcctttatccaaatgtttataatcttttccagaattaacttttataatactttctagcttcttttcttcccattcgccttcaaaccctgggaacctcaattctggcacatttttcttttgtgtattactcatctttcaacaccccaagttctttcaggtatgcattgatttcttgttcaacttctgcgatttctttgtcgatatttttcaaatcttgttggacttgatctaaatcaatcggtgcttcttcttcgaatgtatcgacatatctcggtatgtttaggttgtaatcgttatcggcgatttcttgtagtgtcgcgctgtagctatatttatcaatcgtttctttactcttatatgtgtctataatacgttcgacttgggcatcgcttaaatggttttgattttttcctttttcaaaatcattggatgcatcgataaatagtacgttgtcgtcttgttggcgacattttttaaatactaaaatacatgttggaatacttgtcccatagaaaatattcgctggtaagccaatcacggcttctaagtagttcttttcttcaattaaataacgacgaatgataccttctgcggcaccacggaataagacaccatgtgggagtacaactgccatggtaccttcatcgtctaggtaatgtaccatgtgttgaataaaggcaaagtctgctttagactttggcgcaagtttgccgtaaccactgaatcgttcgtcattttcaaattttgaatctgctgtccatttcgcactatatggtgggttcgcaataaccgcatcaaatgtatggcctaaaaaggctggattttccaacgtgtcatcattacggatatcgaagttctcataacgcacatcatgtaataacatattcatacgcgccaagttgtatgtggtattgttacgttcttgaccgaaataacgatacacttgcgtttctttaccaacacgtaacaataatgaacctgacccacatgttggatcatacacgtgacgtaatttatctttaccgtctgtaacaatcttcgccagtatcttagatacttgttgtggtgtatagaactcgcctgcttttttacccgctgtcgccgcaaagcgcccgataaggaattcatatgcatcacctaacatatcaatttccatatcactgtgaacgaatggtaagtcgtcaagattaaccatgactttggaaattagtgcagtacgttctttgacattgttacctagtcgcgttgaactcaaatccatatcgctgaacagtccgataaagtcattttcactttcttcacctagtgttgatgtttcaactttacgaattgccgtcgccaggtgttcgatatagaaatcttgcgtttcaatttcacgaatcatcgcactgaataaatcttgtggctcaatgaagtaaccgacttgatcaattaattctgcttttaagtcttcacgatattcttcatctgcccatgcttcttgatacgtgatgtcttcacctgacaaggcatctgcatattcttgttctgctttttcagataagaagcgatagaaaatcaagcctaaaatgtaattacggaattcactcgcatccatgtcccctcttaaatcattcgcaatcgaccataattttttatgtaattcagcttgttgctgacgttgtttttcagtaatagacatgtgattcctccgcctttgaataagtaatttatctctttgtgtaatagatttattataacatttggtgttgttgcgatgttgagaattttgatgttggtggtggaaatttttgagttttagtggcgcaattgttattgaaaaattttaaggaaatgttgtagctttcaaatgatttcaaaatcatttatattctcaatgatgtcaaaaagctgttcattcttacataaataaaaccaatcaacaattgagttggtgaaaatcaatcattgattggctttgatgcatattaaataatgcaatatatattaataaatgttagttatagtatattttgtcaggattgggtgaatgtctaacttttaattatttatctaaattatctgcaatgaatttcttaatttcaggagaaaaataaacagcaaatcctcttttactttcacctgatggagtattaccagcaaaaattacgccaattgcttctcgcttactatttaatataggtgaaccagagctaccaggctggataattgcatccgatgtcactatatttccattcactgataatactttaccagttgattcatacatttgtagtttatttccattaggatttggataaccaatgattgatatagattcattttctttagcctctgatgctatattaaatttgctagtgaaatctttgaattttctaccttttggttgtgttgatttttcttcaacttgtacaaccgcaatatcttctttaccaggataatctacaatcttagtaactttataaagtccaccaccgttattataaaaaccattaggatgagctttaatttcatcaccgactttcatgtgataagtcacatgtttattggtaatgattgtatgatttccaactacaaagcctgttcctgcgcccatccatgtaacaccactgtatggtgcaacattcgtattggtaattaatttcacactattttctgctttggctgtttgttgaacaccctcaattattgttgtgccgacaccagtcattgatgttaaaatcgtcaatgctgcaatacttttgatgattatatttttattcatttttgtgctcctctgtttattcatgatgcttttgatatagacgtttgtttttttatgttatattcaccgatgttttttcattaaaatcattgaacaacatgttcttggtgtaaatttaaatatgtttattgttcaatgtgcttttgaataaattctttgatttgaggcgtaaaataaactgcaccattgtattctgatccgatttttccaatacctccataaacaactcctacgacttcattatttgaatttaaaactggagatcctgaatttccaggctcgatatatgcatcaaaatttaaattattatctttaatactttttacagttccagttgattcaaattgtttgaatgtattttgagctggtaaagggtatccaataactttaattttgtcgttaacttttgcatctttggcaaatttaaaagcttgtacattttcgttaaaattataaccatttgctccacgttcaacagcattttcttcaacgtttattactgatatatcctcattacctggataatcagaaatatttttaattttataaatgccaccgttgcctttgtcgccatttgggtgcgcggtaattcgatcacccactttgtaatctttcgatacatgtttattagtgataattgtattttttccaattacaaaacctgtcgcatctttaaatgaaacgacgccattatatggaaaaacgtttgtatctttaacttgcgtaacattcttctctgcatttgctatttgttgtgtctcatcaacgactgcagcatttattccagttactgaggttagaatggctaatgctgccatgcttttaatgactatatttttattcattttcaagctcctttacaattcgagatatgttgcaacgctcgtttaaagtcaatttgtttatttatctatgttttctgcaatgaatttcttaatttctggtgtaaagtagacgccatatgcatttctgttatcatcattttttacatcagaagcaaaatgaataccaactaattcgttgttgctgtttaatacaggtgatccagagtttccgctttcagtatgcgctgaatatacaatgctgctaccttctactgacatcacaggaccagttgactcatgtaaaacatatttatttttgtatgggtgtggataaccgatcactttaattcggtcaccagctttagcccctgctgcatatttgaatggcgttacattatcattaaaattaaatccttttggtccacgttctattgcacgctcttcaacttgaatgactgatacatcttctttacctggataattaataatctttttaatcgaataaataccaccattacttttatcactatttggatgtgcagtaatacgatcgccaactttgtaatttttcgccacatgtttatttgttaaaatagtattctttccaattacaaatccggttgcactattaaaagcaactacaccagtatatggaaaaatattagtatctttaatttttgtgacattattttctgctttggcagtttgttgaacttcctcaaccaatgttgctccaatacctgttacagatgttaaaattgttaaagctgctaaactcttgatgactacgtttttgttcattttaagttcctcttttttaattattttgatatctagatacataattcagtatatttagttaattatgtaaccgttttcttaaacactctttaaaaaatcaacttcacgaatgaattgatgatacttatttttcaatattattttgaataaattcttttaattgtggtgtgaaatagacaccaaaattcttttcagattcatcttttccactacctgcatataaaataccaatcagttcatttttagaattcaatacaggtgatccagagttccctggttgtgcatacgcatcaaattccataaatgttccattgatatgattaatcgttccagttgattcaaacattttatattttgtttgtgcaccctttggataaccaataacagaaattctatctttcgcttttgctccgtctgcaaattttgtataactaacgttcttattaaaattcaaaccttctgtacttgtttcatgaacatgaactatcgcaaggtcttcttttccgggatattctacaatgtctttaacgtcgtagtttcctccgcctttacctttactcgaatgatgtgctgatactctatttttaaaaatattattacttttagcgatatgtttgttagttacgattgtatttttccaacaactacaccagtaccacccgcaaatgctaccactgaattgtatgttgccttagttgcatcggtaatttctttgacattcttttctgctttggcaattgaatgaggctgatcagaaatattttcagcgaaaccaagagatgttaaaatagttaaagcagttaaacctttaacgattacatttttattcatattttacctcctttcaaatttatttttatagttaatgtatctaggtacacatttactatatacattttatataaaaatattaattaaatattaattaactacttattaacattttattaaattcatatacatgaattgactcatttatttaaatatgcttaaaactcaatatcacgcaattaaaattgacttatcaggattattttggtcttaaatattaattatagaactgaaattgtaatatttattcggaaattaggtgattgaatatttatggcggaatggtgaacaattcatgtgtttataatctttcactttattatgtattgtgtttaactatattattagcgattagttcccctattatttatgacaatatgcagtcaatcaatgaaacatgcatgtattagtatatttggaactagtaatgtattgttaattattgaagatgattgaattatggaatttttttcgagatatgttatttcggggatcagattttgcgattttgacttggatagagtagttgcgatttgtaaatacatttttcaaatttgattcaatttcgttgttaagataatatgtattatgttcattgacatgttgatgcatgtctttttttgttctgataaagtataaaatgtttacttaatattactaagtatgacacctgctaattcaaacattatttgagacattcttttcaaattaattataaatttttacctatagactagtttgatacttatctacatctcaaaattctcaccaacaatttttcattcccaacatttttactttaatttttataattcaaaacaacaaaacgatgttaaaaaattattctattttttagttaatagatagttaatacatttttgatgtttagttaattgttcttttaaaaaaatattattatatttgcattgtaaacgtttgcaatataaaaaaaggagcaattaaaatgaatacaaaatttttaggtaaaacattagtagcaagtgctttagtattaacaacattaggaacaggcttacattcttcatatttaggattagatacaaataaagttgttaaaacagctaaagcagaagaaaatatgacagaaggtcaattgtggaaaaaagttaaagattctttaattgattcacagattattagtggtaacaatggcgagtcagttaaagtaacttatagcaatggtacaggtcaatctaatagtgttgaatcaactggtaatcaaactggtgatgtgttttcaacaccaagtaacttttcaaagttaaataatataaatataactagacaaaatgtaggagaagaagatttcaataaagttttaaatggaaacaccacttggaatactcttactgaaaaacttgaatctaaaggtttaattacaaaaggtcaaaaagttacaatccacagtaatagcacaacagtttcaggagtggttggagaaaaattgaccaattcaaatgatatcaaccttgaaaaacgcttcatcaacaaaatcacaattgaataaaccttaaactcaaatttccttaattcataaaaccttaataactaaccctttcttacaaaccacctagcccataataaattaaaacgtcatttttatttcaaatagcggaaaataaaaaaaccattccgcattaactttggcaagttggaatggttaaaaaaatattttagaagccagcgtttggcttgcttagacgacatgttcgcgcatgtcgtcttatttttatatttatataataacacgcaattcaataaaatgtctaatcaataaacctcaattacattcaaattcaaaaactttgcacctaatattcatcgcttaaataaacattacgtttaattaaccagacattgtcaatcgcgtctaatacccctgttgtccgaatacaaaattattttgtattcatatttatctgttctttttcctcccttttaaacgcaactaaatttcttttaccattagcgccccaatctttaatctttaattgttctaccgctccatttattaaatcctttaaagagtaaaactgctaatagcaacgtgataataatatagatcgccaatgttaatgtaattggtatactcccttcgataaacatataaacgtaacgtgtagcatatgtgattggtaaatagaaccacgaatgatctccaagcacttctaatccaaaataaacgttaaaaataaacattaaaactccgacaacaatagccattacatctttaatgaaaatactaaaaataaaaagtagcaataatataattacattgaaaaacaatgatacgcctataaacataagtgttattttcatatcatgtgaatgccacaataaattaattgatgctaatagaatacatatggctgtattagtataagtaaaaatcattgatgcatttaaccaatttagcctattagcttttcctaaaatatgattaaagtgaccaatattttcttcaaaattgataacttgatagacgtttatagaaattaatagtgatgtaattgcattaaaactcgctgtaaacaaactaatttgtcgaccattccattcattcacgtttaaataccaattaataaataatataaatagtatggttacaataataggtacaaatgtaagtgcttgcttagaaaatttcaacttacatgactttaattcgttaattatcattttaatcgccaacttttcttattatttaaaaatgttaatattgcgaaaagaatgatgcttataataatcgaaatatatacggcattgagatcattaaaatattttgagttatgatttacaactaaaccattaggtaatatgccaagcgttacaagcgggattctctgcatgatcgcccatggcaacacccaaaataaacttttcaatgttaaaaatatgacacaaatgactgataatactaagtttattaatattgatacgaacaccccaaagtatcgtgttaataaaaagttgagcggtatcaatggtagagatacaacatacataaataatattgtcaccaataacaacatagcattaaccggatgcggattaataataagatcacctatataagcaataatgtatactaaaaagcaatgtaccaaaaatgctaatgataaaatggcaatctttgttcttatttcttttgtaattgaccaattattacttaagtaataattaaatgatttatttctcatttcaattttaaataacgaattacaagccatacataatacaattggaatgaatgcaattggccaaatattaaataataatgttatatatggtgacacactattcgctgttcctgaattacttttggcgaataaaactgtgaaaatagcaaaacaaagaaataccagtggacttattaataatacatacatactgaaagaatttttaaatttgataccttctatctttaaatgtatcatttgtaatctcctttcgttattttgaagaatatgtcttctaagttttcatctttgttatttctttgctggtattttagctcaccttcatgaataataccgatatgatctgctaaaacttggatttcagataaaatgtgacttgagataatgatactagtaccttgttctgttaataattttagaagttctctaagttcttgtattccatatgggtctaaaccattagatggttcgtctaatactaaaatttctggctttttaattaatgccattgcaattccaagtctttgtttcatacctaaagaaaagtccttaacctttttctttttatcgacatttaaattaactaaacttaaaacatttttaatttcactgaaatctacactttcatttaaacacacgattttcaaattatcttgtgcacttaaatggttatacgtcgccggtgtttctataagtgaaccaactttgtgtaaatcattgcgtttcatcggttgattatctaataatatctctccagaatcttgttgaagtatgccacatataattttcataagtgtcgttttaccggctccattaataccaagtaatccataaacttcgttattttctaaagtgatattaatatgctttaatacatcttgatttttaaaccgcttcgaaatattttcagtaactaattttgccataatcaaaaactcctttgatttattaacttgctttttgatttgttacatttaatgctttatacacatcaagctcaccatgtccatacctactaaatggtttattattcttagatgtcccatgctgatataacaattcaatcgctttatctggatgtttttcaagatgatatttatcaatgattaaagctagcactcccgaaactttaggtgtggctaatgaagttccagcttgataaatatatcttccgttattggcagtagttaaaatgttctccttatgcatatacccttcattcatccatttatcctcaccaaattgttttaaataagcaaatgatcctccgggcgcaacaatatctgtataattcataccaaagttggaaaactcagatagattactattttgatctgttgatcctactgtaacgacattgtccatagatgcaggaacatctttcacttcgccattaccttgatattcacgctgtaaatttagtttctgtttgtcattgacatcaataccatcgttaccagctgcagcaacaacgatagattttttcttcttggcgtaattaattgctttctgtaacgcatcgtattctactttttcatcttttctaaaagtttgatggtcatttttgtccaaaacagtataactaccaacactaatattgatgacttgatttccatcatttgcagcttgaacaatcgcttttgatacccaaagcagttctgtttttttactaccaaacacgcgatacattgtaaatttattattcggtgcaacacctattaatctaccattagcactcgtttgacctgacaccatcgtgccatgtccttttctatcattgacatcgcgaacatcacctgtttcttccggttcagtccctctaaagccgtttaaaggtactaaatttttagaatcagtcgagaaattatttttcaaatcgtcatgggtttgcatcacacctgtatctatgattgctattttggtgtttgcatgttttggcaaatcatcatacgatgctccattttttgttattttattcatatcccattgtcttgaaaataatgactcatttgatgttctgtctattgttttctcgctagtaatacaagttgaacatgtggcattgatatatttaatatcatttttatagtttgctaatgcattagcatgcgttttcgtcattttaatctgtgccacatgtaattccggtatattatagacaacgtttaaggcattctttttaactaacttgttaaatgttgctgtatttttgtattcaacactgtaatattgttcttccgacgctgatgcagtactcattgtaaaagaaattaaaagactcaatattattaaattattaagcacgcgctttatggttttcatcttcttatctcaaatgaattccagaactttatatggttctggtgcgacaacattctttttaaatgtttttgacgctaattcataactttctgaaatatttactggatatattgatacaccataatcttttaataatcgaatattattttgagtaactggattttcccacatgcgtaaattcatatttggaaatattgagagtttttcaaaagctgtatgacaaatagttagtaataaattgtcacatataccgtttgctattttattaatcgtattagatgtcgcaggtaaaataataatcttgtcatgtttatttgctatatcaacatgatttaaaaaaggattgtcaaattcgtcataatagttatcacaaaattgttttaatatttcaccgttaataaactttctaccattcgttgatgcaattacatttacttcatcaaattttgatttcaattcaataatataatggctaatgttgatactatttactgagccacacaaacaaatcaatacattttttcccataatatacgcctccattcagctgattaaaaacgcatttgtccaatttttttcattgagaatatttgtattttgcaatgttatcaatgttaaatagactcctagttctccttctaaaagacctactttctgacttttaaatacgccttcttgattctcattaatgtctataaaattcactagatgattttccttataatgagaaatcagtttatttattaattcatttatataaacagaaactacatttgattcaaaatgcaaattcatggtcgttaacattaatatttgtgaagataatccatgacaaatagtaggacttattagatttttctccttatcatttacaacttgtaacatcacttttttagacgtttgaataatttcatcatcttgtaatgcttggccgattaaaaataacgtcgtcatcacacccgtattaccataacaccagccattccgaatataattgaaatgattacgttcagaaatcaaatcgtaacgctgcaaccatcgatcattgcaacaaaatttttcatccacaataaatttgtacatgtcttttaatatgtgctgatgattttcaatcgtaattcctttaatcacgcataatgcaaataaagacatcggtcctagcactccatgtgcaaggccaagattgatattaccttcagtaaaataatttttatcagactctaaaaattgactttcttgtgggactacccagctattttgagaatattgaatgtctttaaagtatgttaatatactttttaacgctttaacatttgtggcgtttgcgtctacccgatttaataaatatcgccctatccccgctaaaccactgatagtatcataatttaatggatttaatggttcttgtaatatttgatccattttattttctatttcattcacaatgacttcatcaatattatttaatatattttgataattcctgccattttgtgatgctatatccattgaaaatgcaattcctgaaagtccaccaaatagagaatgattatattgatgtttttgtaagtatggtgctaatttcatgatatacttatgcacgatttgttcagtatttgtgttgtatgctttttgataggcatctaaaaataatattaaacctggaatgccatgtgataatgttactggttcaaagtaatctgtttcagttgatgcttttgaaataaaatcatctacttctgaaatctcttgaaactttttcttcaaaattagattcaaatcagtcatttttatcaccacaccaatacttttgagttttaacaatttcttttacaatagataaaacaaatctttcttggtccttatcaacgccaaatattcgattgcaacgcatatgaattaaactgccaataatccttgaccttttcgtagctaaaggttgtttaagacctttatttaattttctcaaaatttggttgtcatcttttaaaattcgataaatatcactatagtgtttggcgatgttttcgaaattattttcaggattacatatagttacgagttcatttttaaaaggtctaatctctttgcttttatatgaggtaggtacatagttattaacaatttccatacgctcttcattagaaattgacaacatttcaaataaatacattattgaaatagcaacaataaatggtcgctcaaacttaaaatcattgtcaataatattgacagctaaattcgagtcatattcaaaaaaggattctatttcatcaatcgtgtttttaccgccatatctaaaaaattctggctcatatgatacaatttcataatctgaaacctctgtcgtttgacaaataaatgataaccaatctttcaagatactgtatattacattataattttcgtcattcctgtataacctcaactttaaaatgtcactttgtttgatatagcgcattaaaaaatattgatctatatctcccttatctttaagatgttttacaaatggatacaaattgtcgatgataaatgtatcttgcgacggcttatcgatatgaatatgtaatgcaaaccagtctttgtcatattcaatatctgtatttttatattttggaatttcgatttcgggtcctcgataagatgattttttataaattggtgtaacaatttcatacacatgatcattctttgattgaggtaaaaatgattctactaaacgtacacgtttatgcttcttatattctttcatcaataaatatctatgattagctaatgataaatttagtagaagcttgttatctccataaactaaattcacgatgttaggtatattgaattgttcttgatatttcaaaaattgttgatcccattcttcatttttaggtaaaggtaataccatctcgttaattttccaatatgctggtttaagaatgacatttttatatctgattcgtggtgaataactaaatgaatcaatactcacatcattcataggttcaatgcatttcacagattccattgaaatttctcgtaacaatcgatataaattactttcttttaaaaagttatacatattgtttgattcaaatagtacccttttatttagttggctagaatataaatataatttgttaaaggtagcaccaacataaatatcatctaaggtaagctcatactttgaatcactattactacttcctaaattcaatgaatattcgtatgagtcatgattagttaatacattatgatttctcggatatttcggtatgttatttatagaaacaaattctacattgtcatcatgcatcgacttttgataataatgcgctttttcatgttctaattttgctaaagtttcagtatcaattaaatgatgaaagcgcccaaatgtagctcctgcatttaacgaaactgttataggactaataacaatgagttcattatactgattgtaaaaacgtcctaaataaatttcagcataaacatctgcactcattggcgcatgataatgattgatttcattatcgttaatcaatgtctctacatctttttcatttatgactatctcatcgttatttctcaaggcatgtaaaaatttttgcttaagcattacaatattattttcgtcgcctttaacttcattataaatcgatgttccaaatcctgtgatatccgaaagtaaatctttaacattaacaagttgttcaaatccatacttttcaataaaacgattgtgaagagctttcaaatctgtgaatccaatattatttcttgataaaagccacaaaaagtacgctgcttcagatatatttgttgctatatcttggtgtaattgattgttaatcatgtcaattttggtatcaatttgaagataatttttacatttgaatagtgccttcatatgctgaataatgtctttatataatttctcaccaaatccaatttctgttttttcataagctagtatcaatttctggatttctctaatttttttcacaaaattatcattatgtaaagaaagtttagttaaaatataatttaaattatcattatttgataacggtggtctgattgttgaatatataatttccttcgagacaagattatgaatatatgcttttactttagaaatatcataaatttcaaattcttgatttatcttttcagctaaatttgaaaaagtaatattattattcgtcacagtgattttgataaatacgagtaattcactatttttaatggaaaaagatgtgtctttattgttattcaaataaatagcactttgttcatttaaatatattcgatcattgataatatgtgctttactattccaaataactttcaaattttgataatattcatcaatactctcaatataactaatcagtttatacaaccattcgccatcgactttcacatatttttgaatactatttccaactttaagacgtgttggttcatttacaaaatgccccaaattaataccacttaataatccaaatggcgttggacgtgttgacattctaattaaatattttaataaactttctttagcatctctaaccttcttgttatcgccatcaaaatttatttcttgtaaagtacgatataagttaaatgttgttgttaggattgattctttcatctgagcatttaattgtaagtcgctatatttaatttgttcagtatttaaaaataaattgaaaaattcaactgataataaaggtgttctaatcatacaaatacttgacggttcgtaaattgtgttcatttgtaagcacctcacatatttgaatagacaaatagagccctttcaggctctatttgctatagtcttaacagcagaagctattaaaactaccagtcttaccacaaccaggagtacaaccaatgaaactagtaatacgttcgtcacccgctgaatcagaagtgtcgtttttcgcttttacttgtacgtctaaatcaagaacattttccatagataatacctcctattaaaagttgaagttaaggcccacttcaattgtcatattatctcttttaacacaacaaatcaataaattatataattatattttgtgaattttttgtaaactcttattaatttatcaatactattttgacatttagatttttgtgtttttttattactatttattttcactaattattttacatctaagttcataattttaaatttattgatgaattttttaatagattaatcatttcatttatacaaatacttagatatttttatctatcaatactattacgaatttggagatggctgcttgagattaattaatagatatttatgcagttttgttctatttatacaaaatttagcaaataataattgaagttattttaaagatgaggatataaacatataatttcaatgacttgattattttcttaaatgacatgttctaagagggtcaatataataaccaaagcttgtcattacttatatgtaaagatagaggctaattacataatcctaacttatttaacaggaagtcatgaaaactatattacaactaaaagtataactttccatcaccaaagtcagaatgtgttgaaacactcaactgataatatagaaggctaattataaaaatacctgacgattagtaaactgtttccctttttaacacctaatatatttaaaaagacaaattgaactgcacccagtctagtagacaattaaataattaaaattaatggttggttttgttgttatacagaatcagccatttttaatgtaattctttcatgattaaagaaaagaataaaatcatgaattgtttttgtagcttcttctacactattaaatttaaagtgcttatttcctctaaaaatttcactttttattgtaccccatacaccttccattggaccgttatcgatacatttgctaacacgtgacatactttgaatcatgtcacattcatccaacatatgtttaaatgttttcgatgtatattgaaaacctcggtcactatgaaataaaatacctttggtattttctactttttctatcgcttgattgaatgttttaaatactaattgattattgttagaagggcctagctcataactaacaatacgtttaacacctaagtcataaatggcactcaaatatatcttactaccttctttgattttaaattctgttacatctgttaaccaaactttatttggcgtatcaatgtcaaattgtcgattaagcttattttctgatgtgatttgtggcgttgaacggcgataaggttttcgcttttgacgtattaccgcttttaaattaagttctttcatcaaacgataaattcgctttcggtttacttgtttacctagttttaatcgaatatagatataaatgcgacgatagccataaataccgttatacttatgatagattgattctatttctcgcttaagttgttcattctctaattcaagttcactcgattgataatgtacccacttataataactcgctctagaaatgcctaaaatacgacacaagcgttggatagggtattgatgttttaacgcttcaatcgttttgtatgccgtgatttgttttctctttgaatcatctctctctccaatgcttgaaacttttttaaaacgtcattttccatctctaataatcgattttgtgcttttaatgcttgaatttcagcttccttttgttcttctggcgtcataatagatttcggttttcctttgcctctgccatctactaatccatttttaccatgtgcttgatacttttgaacccactggtaaatttgaccgtatgagatattaaagtgttctgcaacttctctataagattgtttatgattcaagtaatattcaacaattgtgacacgttcttcaaatgtggtttttcttgctttcatgatatacaccccagttttcggagattgactcttaatctcttttcctacagtatacatttttatccaatttttgacttgtgtcgaactacgaatattgtatttgattgcgagatcttgggttgattgatttgaattcaaatattcatttacaacttttaattttagttcctttgaatagtgattgtattgtttttgtgtaagtagtgtttcaataccatgggttttataatatttatacttaggatacaaagtattgacattaatatctaattgtaatgtatcgattaagtattgaaacgacacgcctttttcatattcttgaaacatatatagcagtacatctatgtctactttaggttttattgacataaataaagctcccttcaaagttttcattttttcaatgtctactttgaagggagcatttcaaatagagccttctcaggctctatttgctgtacccttaacaacagaagctgttaaaactacccgtctttccacaaccaaagctacataaaaaatggctagttattctttcgtcagccgctgaatcattagtgttgttatttcctttaacttgcacgtctaaatcaagaactttttccatagataaaaccccctatttaaaagttgaagttaagacccacttcaattgtcatattaatcattaccacacaataaatcaatgaatttaataataattatttgttattaatttgtaaatcgtcattaattttatggtactattgtaagtttaaacaaataatgtaacttctattttataatatgttgtgaatattttttgtttaactcttaaatttcgggtttaacttcctatatttctaacagttatactccaggattagtttctttagaatccgtaccgattaatttaacagtatggttttgccagtcaacttcataagtagatgtaaacgttactgtattttgatttttgtagttattaccaatccagtgtagtcgattccattgattagtatatctatccatttctctttggtaagttactttgattttagatttttttgtatcattttgtttatgagaaagtacgcttataaattctgggttaaagttaccacgcgccaataaaggcatttgatgtgttggcaagaaattttgaccagcatttgaactactttgtctaccacctaaaaacagttcattaccatatgttgggtcataactatctctaccatatggtccccaaccattattcataattttgtgcgcctcaacaccccagccaattgatttatgatttgtttttctatcaatcgtagttctgtaactttcctgtttataatttatcgtttctgaaaatgattttgatccattcaatccacctgataggccgttagatatattaatatctccaccataagaataacctaatgtttgttgaacttggaattcttcattttgatttttaggtgcatagtcaacaacatttacagcatcatttgactctgaactaaccgaaacattatacttaccgccccaataaaactgtgagtaatcgtaatcttttggattaggctttttataacctgaattaacgtttccggctgccttaagtactaacgtatctttgtcataacttttatccttaatgaaattaaacgttaaaatttgagaaatattcaatttatcattatcagatgttgctgtcgttttgtataaagtgattttatcgtctacttttttctcgctaacaggtgtaatatgttgagctgcatcaactgtattcgatagcataagcaatgcaattgatgtagcaactgatgatttgactaatttcttcattttcatattaattatgtcctttcactttaatttcgtgtgttttccagttaacttcatatctaactacaaagtttctatttacaaatgcattatgctttctttctgcgtaaataccagttctagggaataaagtcgcatatgtaatatctaagtttctgccatatgaaatttcaaattcactcgtatcacttgaacctttttcatgtgatagtgtagtgataaatgatgggttaaagccactttgaactaatggtggcaattggttatcaggcacgaaatattctcgtgctgaacctgacggaccatttggactttgtacgaataaatatctatcatgcgcagattttttaccatcaggcgtaacaaattcgtttgctttaacaccccatttaacagattttgagttttacttgtctacttcactgacataactcttttgggtataactaattgttttagaataattaaatgagccattgccacctatagatggtgctgactggaaattacctccaatgttatatcctaatgtttgaccaacatcagtagtttctattttatttttaggaaggtaattgattaagctaacatttggatctttagtcgtcagtcctatattatattggaatggccaaatcattcgtttagttaattcatatccactacccttcacatctgaaaatgaagttctggaattgataaaaccttgcattttaacaattaaagcgtctttgttatattttttatcttttacaaagtcaaattgaacattttgagtaacgccccatttcttactacttacatcctccgtacgtttgattacttcagcaccatcaccaatattttcaatattagtattcgctctagattcttgaatcggagatgctaaaggcgcaatcagtcctactgacaaagttgcagctaacatttttttcttaaacataagtttcactttctttctatataaatttttaatacaaatttattctagattatttcacttatttataaaattaactgttcattaaaaaataaaatgctataaaatattaaaaatgacacaatttattcatttatgatgctgaaaaccggtcattttggcgcaaccttcattgtatttaaatagttccctttatactcgaacaatatgataaaattgccgacactcaactttttctctataaaaatcaaaacgaactttaatcaaatcttaaaaaataatgtttgtattatcacaaataatcaataatttaatttaaaattaactgattattaactattgtccgttaaatggagatgattacttcatatactgttataactgaatcaatacgtatatttacataatcgttaatcaaaaaagtaatggcccatttacaattaataaaagataagatgagaaaaatctcctaataaaataatattttttattagaagattttcgtataatataatcatatatggtaaatatactgccaatgagtaaaaagtacttcaataatgctgtaatactttttttgtgagagagaaaaaatgattgaacaattctttctaatagttttaaaaatagtaaattactataaaaagttagaaatacatggttatatttcattcttatattaaatttatatccatcatttaaaagaaattctattattggaggatgcataatggaaacagaattatataaaaacctactacataaaataaagattttcgaaaataatgtaataaatatacctatgattggggaacaaacaaagcataagttatttcatataatagatgataaagaaaaattcactctaattattaacaaaggtggtcgtagaaatccacttaacctaactattttgctaagaagtaataattataattctaatatgattaggtttgatgttaatggtagtgatcatgcaaatccaccaaataatgaaagaatacctacgccacatatacacatatatactgaagaatataataatggtggtattgcgatcccattaaaagatattgaagatttagaattaacagatgaaattatagaatcattagacttctttatgaagtatactaatataaaacacgataatgttataatagaatcaagattactgtaaaagaaatggagggatactaagtgaagactatcgaagaaagaatgaacgaatatttcaactggttaaaacaaaattatatcttcaaagaattagatagttctacagaaattactactccctttaagaatcatttgaatgattttattagaatatatgctgatacactacctaataatgaaatttgtctatcagatgacggattgacgattaatgaattagaaatgttgggtattgatataaacacaaaaacgagaactaaacttatacagaatattttaaatcaatttaatttaaaattagttgataaagaaattacagccgatgttaaaaatgagagttttgctcagtctaaacataatttaattcaaggcatattgaaaatttatgaccttactttaactactaaatctaacgttacaaacatattctatgaagaagtatttgaattcttatatgaccgagaaataagaggtttagcacaagtttctgtttctggagaatcaggtttaaaatattctattgattatattgtttcagaaacaaaatcacaaccagaaaaactagttaactttacaaataacttagattttaacaaaataactaatgaagcttatatttaccgtgatatcaaaccaaacagaccatccagaaacaaattagaacctatcatgttaataattgtaaatgatgtagatcatccgataaatgaaagagcacaaactgtagcagaacatgagaaccttgaaattttaaaatggtctaataaatcaaaaatcattaaaactttaacctcataaattagcagtagtcccttattcatattctttaattttcaaatcatatcgtgcaagtaaaaaagtagatacttttttatttgcacgttttattttagaacaaaaagagcaaggtcaacgaatcagaaaatctttttcttgaaacgtatttgacacttgctcttttaagaatactaacatttcattgtatttctgttaaattaacggagaatgaatgatatctttatactaataatcttaactttttaacatataaaattaatacattgtactaaagtttcaattattttataattatataaatgaatcgtatacacttagttagacaaatctaagaatttagatattgtttaattataaaactatcgattcacataaaaataaaaggagataacagtatgacgagattattcagtctattactagctagtacaatgattttagtcgcatgtggaaaagctagcaatgaaaataaggaaatggaagacgaaaaaaaaacagaagtcaaaaaagaagctaagaaaaataatgataagccaaagaacgaaaagaagaatcaagatataaacaaaaacaataatgagcaagttcaaaatgtcaataataaacaaccagtcttaaataataatagtaatcataacaatcaacaacaaagcaataaaaacaattacacagttatagaaaacgggaatacagttacagaaatttataatgggaaatcacacacaactacaaataaccctattagagaaggatatgtagaaggagaaacagacccgatatataaaagagagtataagcatttttatacacctgaagaagctcaaagagcacaagaaaatagcgatcaaattttaagagaaatgggtctcgaaccagaaaggtatgaataaaatcaaactaaataatttcgggtagcccgcctacccttattattttttttgccgattttgaggaggagaaataagatggcatcatttactattacaaaaagaaagaataaaacgtcgacatcttggcaatacgatttgaaacatccgtctttcaaatcaggaaagaaaagaaagtcgggattcaaaactaaagcagaggcaagtaatgctgcacaacaattgattagagatttggaggacggaaataacattgaagataacaaaaaatttaaagaatactacagtgattggataaatataaaaaataaaaaacaattatccagcaaacagttttattggtacaaaagatcaattaagttatttagcgagttttttggggaaaacatgttagtaaaaaatattactcgaagcgaatatcaaaggtttttaaataaatacgcacaaggtcatactgacgagaccgtgagaaaggttcacggttgtttagcaagatgtatcaaagacgcattatatgatggttattttaaaaaagaccccacctatgatgttaatatcaaaggcactgaaaaatctaaagatgagaagtttaaatatataacgattaaagactacttaaacttactagaatactttaaaaaaagagatgaagaaagttatatctttctgtatattttaggtattactggtgcaagatatagcgatgttatcaatatgacatacaaagatttaaacaaagcaaatggtatagttcatttacccggaacaaaaacaaagaattcaaaacgagacgtagaagttaatccaagagatattatgcgtataaattcaaagttggctagattgccacgtagaattaacggaaagctattttcggttagtcatacatcagtgagcaaatcatttaaaaaagcaaaagaagtaataggattaaataatgataacatcactccctattcacttagacatactcacacatcttacttactatcaaaaggcataccgattgaatatattagcaaacgattaggtcactctacaatatcgcaaacgttaaacacctattcacacctacttgaagaacataaaaaagagcaaggtcaacgagtcagagaattattttcttgacacctatttgacacttgctagaataaaaagctgttaaatcaaggttttaaagcttatttttacggagagtgagggattcgaaccctcgagacgcttgtggcgcctacacactttccaggcgtgctccttcggccaactcggacaactctcctcaacaataaatatgtaataaaaaaacagaagcgatatttcacttctgtttgtatgactcctacgggactcgaacccgtgttaccgccgtgaaagggcggtgtcttaaccgcttgaccaaggagccatggctccacaggtaggactcgaacctacgaccgatcggttaacagccgatagctctaccactgagctactgtggaataatagaaaataatggagcgggtgatgggaatcgaacccacaacatcagcttggaaggctgaggttttgccattaaactacacccgctaatgtaaacgattatggggcggctgaaggggatcgaaccctcgaatgtcggaaccacaatccgatgtgttaaccacttcaccacaaccgccatgaattaagaatggttcaggacagagtcgaactgccgacacatggagcttcaatccattgctctaccaactgagctactgaaccgtaatggtaataataatggcggtctcgacgggaatcgaacccgcgatctcctgcgtgacaggcaggcgtgttaaccgctacactacgagacctattaaattaaaaactatgtattgcgggaggcggatttgaaccaccgaccttcgggttatgagcccgacgagctaccgaactgctccatcccgcgctaatattattttgaattacctaattaatataccataatcaaaaacctaaagtcaagaactttttgaatttaatttaaatgttatctcttaaataattacttaaatatcgtagcaacatgttctctgttgaacacaaatattagtatattcatttttgtagtatacgtcaacgacatttttaaagttttttgtgtaaaaaaacgcttcttattcccttttatcatataagtgtctaatagttgtcataaatagtgttacagcattttaaaaggtatagaaattataaagtttataacgcctataccttctgaaaaagaaattataaaagtttgttacaaccgcatattcattcagtcagcaactacttactgacacaacataacacaacaatacattacctatcgtgtcatgtaatcttgcatccgatcttgcaacgctgtaaatgtttcgaagccatcctcttctaagaaatgccctccatcttccacgattcgcaagttcccctctaatgcattcattaaacgctgagtttctttatatgaaacgtatttgtcatttttagaactcaatccgtaaaaattgtcaactttctttttaatattatcgtaatcaatggttacattacttaaatcaatatctaaatctatattttctgcatcttctttaaagcccgctatactaaaaaagccttcaatcggctgatcaatcatttcaatatattttaaagctgtgattgaacctaaaccatgtgttacaaaatatgtatcctttttgcgtacattaatttgtttcgtcatagcttcaatccactgttccactgtattcgcttcaggggattcaaaattaaataatgttacgtcatatccttctaaagttaagttatgctccaaccactgataccaatgatttctactatttccatgcatagaatgtacaatgattacatctgtcatctcattctctcctttcaacttactacttcttttctatttaaaaaatgaatgattacctataattgtaaaataaaaacaccttaattagaaatgttatatcgcaaagtgacatttctaattaaagtgcattgtcatcatttcaatatcattcaataatagctaaacctttgtctctgccacagtttcatgaaataattcccgctgaaagtatcataatttacacattacttccaccattatataacttaaaaatgactatatttcatcaaacattatctaaaggcatcgcacctacaccaacaccatccagcaattaacttacaactctgcgattacttcttcagcagcaactttaccttgcgtaatacaatcaggtagtccaaccgcttcaaaagatgcaccagttactctaagtcgtggatatgtttgtttaatatgtgcttgaatctgtctaatttgttgaatgtgaccaacatggtactgtggcatacttttcggcaaacgattgacaattgtaaattcaggatcgcctttaaatgtcatcatttgacttaaatctctacgtacaagcgatactaattcatcatctgtatgatcatcaaccacagtatcacctggtttacctacataagcacgaatcaaaaccttaccttctggtgcagtaaatggccattttttcgatgtccaagtacatgcggtaatgtctgtatcactcgttctcgcaatcacaaagccagtaccatcataagtattttcaatgtctttttcatcaaatgccaatacaacagttgcaacagtcgtactatccatcgttttaaagtaatcaaatgctggatcttgcccgaaccaattcaaaaagacttgatgtggtgttgtcactaataccccatcgaatacatcttcttgttgattactgtaaacaattttatattgcttttgagatgtaataatatcatccactgacgtattgtagcgtattgtcacacctttatttttcacatcttgttctaatgcttcaataaatgaacttaaaccatgcttaaattgtttgaattgtccttttggtgcgccaggatataattgtctttgtttcagacgcttatttttttcatccttcataccctttatcagacttccgaatgcctcttctttttctttaaaattaggaaacgtactcatcaaacttaatttatcaatatcggtaccataaataccacccattaaaggctcaattaaattctcaagtacctcattacctaatcttgctctgaaaaatgcaccaacagaaatgtcaccatcccgcatttgagtaggttttttaagtaaatctaaccctgctcttaactttccaagtggtgaaattaatttagttgtcacaaacggtttgatatctgtcggaattcccataattgatccacctggaataggatacaatttgtttttcgcaaaaatataagattgtccagtcttatttgtaacaatatcttgttctaatccaatatctttcgctaattctgtcatgatcgtttttctacctaaataagattcaggccctagttcaatcatataaccatctttacgatacgattgaatctttccccccggacgattcgatgcttcaaagatggttacatcaatattaggatcttgctgttttaaaaaatatgcacttgataaacctgttatccccgctcctataatagccactgatttagtcacaacgtttcacgcttctttcgtcattaaaatatagacttgatttcatcaacaattgcaccgataaataatggatgtgtattcggcatttttggacgataataattcgcaccaatatcatcgcaaacaactttacattcataatcattgtcataaagcacctctaaatgctcacatacaaaacctactggcgtatatataaagtttttatactgatgtttttcatataaatcacgtgttaaatcttgtacatctggccctaaccaaggtgtaccagtattaccttcagattgccaaccaatcgcgatatgttcaatattagattgttctttaattaaaagcgcagtatgttctagttcttgtggatatggatcattattcttttcgattaaacctttcggcaaactatgtgccgaaacaactaataccgtgtctttatgttcctcttccggtatttgagctaatgtttcgttgacttcattcgtccaatattcaataaatttaggttgttcataataatgtttcacatgcgtaagttgaataccatattttgcagcttcttcatcagcacgtttgtcatatgatcctactgaaaatgaagaataatgtggtgctagtactacagtgattgcttcagtaatgccatcattgtgcatttgttcaaccgcatcttcgataaatggtgaaatgtgttttaatcctaagtatagtttaaattcaacatctgcatatgctttatttaatgctgaaactagcgcatcagcctggtcatctgttgtacctgctaatggtgataaaccacctataaattcatatctatctttcaaatcttgaagttcttcttcagatggacgtttaccatgtctaatatctgtataatatggctctatgtcactttctttataaggtgtgccataagccataactaataatcccatttttttagtcattgataataccttcctttaaatgaattatctttcatgtgcttcaatgtaatactatgattatctttgtgtatatgtgtgtacgaattcgcttactttacgtaacgtctctggttgcacttctgggaaaacaccgtgtcctaaattaaagatgtgtttaccgttctccataccttgatctaatattggtttcaatctctcttcaatgacattccatggtgctaataaaattgatggatctaaattcccttgtaatgttttagtaacgcctaattgttgagcctgattaatagacgttctccaatctaggcctaatacatcaatcggcaaatcattccattcattgattaaatgactggcacctacaccgaataaaattaccggcacatcatgtttttctttaacctcactgattaatcgaatcatatgtggtttaatgtaacgtctgtaatcctcgacatttaatgcacctacccatgaatcgaaaatttgaatcaattcggcacctgcttcgacttgagctgttacatatttaacagatacatcaactaaatgattcattaaagcaaaccatgttgcttcatctctatacatcatcgcttttgtaaaattgtaatttttcgatggtccgccttcaatcatatatgacgctaatgtaaatggtgccccagtaaatcctattagcggcacatttaacttttcttctgttaaaagtttaattgtatctaatacatatggtacatctcgttcggggtctatttgagaaagtttctcaacatcttgaattgttttgataggattatgaatcactggaccaatacccgatttaatttctacatcgacaccaattggctttaatggtgtcataatatctttgtataaaattgctgcatctgtatgataattatcaactggtaaatgtgtaacataagcgcacaactccggctgatgggtaatatcgaatagtgaatatttttctttcaattttcgatattctggttgcgaacggccagcttgtcgcataaaccaaacaggtgtatgtgtcgtttcttcacctttaatcattttcaaaattgtattgtttttattatgcaccataaaggcctcctaaattaaaatcattcttatctatattatcatatcgctcattcgttcgtattttcaataaataaatgtcataaaactgacattaaattacacatcatttgtttgtgcatttaaattttaaaatcttgatggattatctccacatctttttgtcttgcatgacttattatagtaactttaaccgtatattaatagtggtaatgactagtttatcgtcgtataataaataaaaacataagggggacctttcatatgaagaaattatatacatcttatggcacatatggatttttaaatcagataaaaatcaataatccatctcatcatttattccaattttcaactgctgattcatcggtgatttttgaagagactgaagaaaaaactgtactgaaatcaccttcaatttatgaagttattaaagaaataggcgcattcaatgaagatcatttttattgcgcaatttttattccgtcaactgaagaccatgtttatcaacttgaaaagaaattaatcagtgttgatgacaatttcaaaaactttggtggctttaaaagttatcgattgctgagacctgttaaaggtacaacttacaaaatttactttggctttgctgatcgacaaacttatgaagactttaaaaattctgatgcttttaaagatcatttttcaaaagaagcattaagtcattactttggttcaagcggacaacattcaagttattttgaaagatatttatacccaataaaagaatagattcgaagaaaacttccattggttatgctgttaacgtatagatgctaatgtaatctgaacgccgtatcatttggcgttcaacattacatgcacctttacaacatacatgccaatggaagttttttagtctcgtaataatgtttcctgatattttaactttttaataatacttctaatcgttaataaacctacaatatagaaaatgagtacaacatagaataacgtcatatgttttataataaatgtcactgaaaacacagtacaaataacaaacatcaatctatataaaaactgttcataccctttgattaccttctcttcaggtacaggccacacttgaggccataagccatatgcttgttgagaataaaattgtgccatttgtaacaatataatatatacaaataaacacccgataattgctgtcactaatggatatgataaccaaaccataagtaaaactgcaataattactaatctaaaaataatattaaatgcgtctctccctcttataaagcttctaataaataagaataaatacatcgcattagagttaaatttactaccctttggaactggtaaaagtatatctagataacttcttctgactgcagattctttcaaatgttttacatcggtgaacatattaacaaatttataataattcatatgatgtcgatgttcgattgcaatcattttctcccaaggatacaaaaaacctggtttatattttttaactaaaaattctattaacacaggcaaagcaaccatcacaaatgcgatgtaccattttggagctaatagtaagtaatatgttagagcaaagatgatgaatgatattaaattaacttgccacgttttaagtcccgattgataccattgccatcttaagcgtaaaccaacatatggaaaaattaatgcaatgactccaaaacaaatataaaatgtcacattatgttgattaatattgtaaaacaacgggaacatcacaataacaataatgagttggattaatatgcgcgcaaagtaactatataaaatcgcatggcgcataaattgagacatgtgtttttcaaatggtaataaaaagattttatccgcttcttttaggagtggtcgcattggaaaaatggatgtcaacgcaacaatcactgctgctattaatgcaaaattgatattcgttggaatatgttttaaccattcaccatatccaaaaataaatgcacccagcaaaataagtaaaaagaccatgaaatgaccattaaatataaacttattataataatttttctctttacgaagggcatgtaatcttttattaaataatgtggtcgcttggttacgcatgtacatctccaccttgcgtcacatgaatatatatatcgtctaacgtttgattatgtaagccagtttgttgtctcaatgcttctaaatctccaaatgcaacgacttcaccttcgtctagtatgataaaacgatcacaataacgttcagctgttgctaaaatatgtgtactcattagaacggttctaccttcgtttttcttttcaaccattaaatctaacatggattgaattcctaatggatctagaccaaggaatggttcgtctataatatacaattcgggattaacgataaacgcacaaataatcatgactttttgtttcatccccttagaaaaatgactcggaaaaactttcaattcattttctaaacggaatgtctttaataatggcattgctcgattcatcgcttcatcacgatcaatatcatatgccattgctgtcatctcaatgtgttcctctaatgtgagttcttcataaataaccggtgattccggaatataagataactttcttctataagcctctatgtcatcattaatgttgatatctgaatttgatagagatccttccataggtgtaagcaatcctagcatatgtttaatcgttgtactcttaccagcgccattaaggccaataagtccaacgatttcgcctttgtttaattcaaaatttatatctttaattacagggcgttttccatatccacctgtaagctgttctactttaactgtcataaggcacctccatgacttatattgtaccaaaaattataaaatgctcatattaaatacacatgtcctaatatcgaatttttagcgacaatgttataatgaatggtaatacaagttgaaaaggagtgtagtcatcatgtcagaaacaattttcggcaaaattttaactggagaaattcctagctttaaagtatatgaagacgattatgtctatgcctttttagatatatcacaagttactaaaggacatacgttattaattcctaaaaaagcttctgctaatatctttgaaactgatgaagaaacaatgaaacatatcggtgcagcattacctaaagtagcaaatgctattaagcgtgcatttaatcctgatggtttaaacattattcaaaataatggtgagtttgcagatcaatctgtatttcatattcatttccacttaattcctcgatatgaaaatgatattgatggatttggttataagtgggaaacacatgaagatattttagataacgatgcaaaacaacaaattgctgaacaaattcaagcacaattttaaatgtatgcttaatctaagctcgaacgggtataatatgattaatattataacaattgcgtttgaagtgataacatcaaggttagcaattttaaacaaaatgagttatcaagataacagatgttaaaagtgaggagaatataaatgaaagcatcacgcattctattcggtatcggtgttggcgtagcagctggttttgtagttgcacttcaaggacgagacgacaaaagtgtcaagaacaacacgatcgatcgtactgcccctactggttcaaaatcagaactacaacgtgaatttgaaacgattaaacaaagttttaatgacattttaaactatggtgttcaaattaaaaacgaaagtgcggaatttggtagttcaatcggtggtgaaattaagtcattacttggaaacttcaaatctgacatcaatcctaatattgaacgtttacagtcacacatcgaaaatttacaaaatcgtggcgaggatattggaaacgaaatttctaagtagcacgttacgttctcgatcacaactatttttattagtaacagcatatttattttttaaaattaaatgccaaataaaagagatgacattagaaattagatatttcttgtcatctcttttttataactcgaatgaacttatgtttacaaattacaggaagacgttgtttgtagtgatttccacttaaatcatatttatgaattgattgaaaacattgcttaggattcattgtgttatccttgcactttgattacgctttacttaaatcattatcgacaaataacattcttatattttcattgagtcgaaccttatatgcacattacatataccttacttgcacaaataattaatctggtgtttattataattacatatcactatatttttagcatttgtatgacttagttggtcaaaagatgcttttgcatatgccctgccatatccatttttatattattcaagttttcaaatactcatgtcacacgcgcctttttcataagtgatgctttattagcaagaatatgtgttcgcagaaatttgttctgcattctacttctacgctagtcaatcagccaattttaccaatccccactttcgcgtttcaaatcaaacaatacgtcgtccctttcttcatatataacaattcttctaacttgatatgttactattgaattactgaacctgagttagttataatctaacttatattgaaaagagatgaggcgtaagatatgtttttatgtaaaagacaaattgatatcaatgcacgatttgggttgcctagaattgcatttatgagtgcagttgcaaccatcattatgtttttagttagttatgaagtaatgtattttttatctaatacgccattatcagatagacattttctcatctttttattacttgtatttatgacgtatccattacataaaagtatacatttattatttttcttaccatatagaaaatcgtttaaagttcataagttgactaaaagaaaatggcttatattctataatacctacgtcaatcaacctgtacacaaattttatttttgcattaacttaatattgccgttaattatcttatctgcaatgttcgtttatctaacaatttcattccctcaatatggacattattttatgttcttattggcattgaatttcggtatttccattacagatttattatatttaaaaataattatattttctaattatggacaatatatagaagaacatagtacaggtattaatattttgaaaaaaattaaaaatccatatcatttataacaaaataattatagcaaggtgttattatttgtttttaggctatgtaatagcttacaatcaaatgtatatagaccttgtttttttattttcatcaattactacccctaaacctaatgctctagtctgatgtcatgggttattgattggtgataatataaaactatgttatattcacgatgattaacttacaaaggagtttcaactatgaagatgataaacaaattaatcgttccggtaacagctagtgctctattattaggcgcttgtggcgctagtgccacagattctaaagaaaatacattaatttcttctaaagctggagatgtaacagttgcagatacaatgaaaaaaatcggtaaagatcaaattgcaaatgcatcatttactgaaatgttaaataaaattttagctgataaatataaaaataaagttaatgataagaagattgacgaacaaattgaaaaaatgcaaaagcaatacggcggtaaagataaatttgaaaaggcccttcaacagcaaggtttaacagccgataaatataaagaaaatttacgtactgctgcttatcataaagaattactatcagataaaattaaaatctctgattctgaaattaaagaagacagcaagaaagcttcacacattttaattaaagttaaatctaagaaaagcgacaaagaaggcttagatgataaagaagcgaaacaaaaagctgaagaaattcaaaaagaagtttcaaaagatccaagtaaatttggtgaaatcgctaaaaaagaatcaatggatactggttcagctaaaaaagatggcgaattaggttatgttcttaaaggacaaactgataaagattttgaaaaagcactattcaaacttaaagatggtgaagtatcagacgttgttaaatcaagttttggatatcatattattaaagctgataaaccaacagactttaacagtgaaaaacaaagcctgaaagaaaaattagtcgatcagaaagtacaaaaaaatccaaaattattaactgatgcatacaaagatctattaaaagaatacgatgttgactttaaagatcgtgatattaaatcagttgtcgaagataaaatcttaaaccctgaaaaacttaaacaaggtggcgcacaaggcggacaatccggcatgagccaataacacaaaaccgagcgaccgtggttcaaaaatcataccacggccgctcggttttttcgcattaaaaatcggacagatgagctcatgtttcagtatactcatctgtccgatatcttttaattcttaatcgagtgattcaggattgtagaatctacgattttcaagaccaaatattttatctgtaaactgacccttgtcagtttttttataagccttttcaaacatattcattctagcatcgatattatcaatatagcataaaatttctgcttcttttaagtatggcagttttggcgaaccatactctaacttaccatgatgagataaaatcatatgtcttaacaacatgatttcttctccttcaatgttcaattcacgagctgcttcaactacttcatcactcgcaatcgagatgtgtcctaataagttaccttcgactgtatacgacgtcgcaacaggaccacttaattctctaactttaccaatatcatgcaaaataataccactatataacaaacttttgtttaacaatggataaatgtcacaaattgattttgcaatacgtaacatcgttaatacatgatagcttaagccactcgcaaagttatgatgatgagaactagcagctggatatgtgtaaaatcgttcttgatattttttcaataaatgacgtgtgatacgttgtaaattagcattttcaatatctagcaaataatgagaaatctcttcttgtatttctgccggtgataaaggtgcaccatctacaaattgttctgtttttaattgatcttcagttgtcgctagtctaatttggttgactttcatctgtttatttccgcgatagtttatgatgtcacctttaacatgtacaatttcttcaggcttgattgttgccatatcattttttgtagccgtccaaaatttcgcttcaatttcaccacttttatcttgcaaatgtaatgtcatataatctttaccttgtgctgttacaccctgtgtagctttatgcactaagaaaaagtgatcaactgaatctccgggatttagattctctatatttctcatcgtttcccgccttcctctattttgtttaatgtaatcacttcttttgatggaacaatattatcttttacacatgtaaagtatagtacttgatagtgttctgataatgatcgtaaataattcaacattttttcagtacgttttttatcaaaatgaacaaatgcatcatcaacaattaatgggaacggataatatggtcgtagtaccttaattaaactgatacgtaaagctacataaagtaattcttttgtagattgacttagttcaacaggatcatataattgaccattaacatgtttaaccgtaattgaatcttcattatagttaatcatcgtatatctgccatctgttaaatgcttcaatatttctaccgcttcattaataacttgaggcaaacgtttatctttaatttgtttaatgtgttcatcaactaaactttgtaaataacttaaacttgcccaatcttttgcaatatcattaagttgatttttaagactgtgatattcatgtcttaaattagcaagtgttgtatcagtttccatgtgattgatttgtgcacttaaatcactgacttgtgcttgcatttcaagatattgctcattatattcgtcaacttgagtagccaataaatgatcttcttcttcaagttgtgctgttgttttttcacttaaactagaacttaattcataagaatagttttggttctcaagatatttagttaaatcattaaaacgactcaaattactagtataagtttggtaatcttcatgatgttgataaaaatcttcttcagtaccaacattgataaaatcgaatagtgctgtaatttctttattattttcttctaattgagcatttaaatgatttaattcatttgtaacaagtttggtattttcagcattaatacgccatttttcattcgtgtcttcagctgatttcaaccattgttgcacatcgtggaataaagataatttgttgaaataaacaaattgtgattttgtaacagcttcagcatgattgtagaatgtatctaattcttgaaccaattgctggcgttgttgatttaaatcactgatatgttgatctaatgctttaatattcgccattgtagaaatactatcaacaattaaatcatttgaaattttagatgataagtataattcatccttaacgttttcaactgtcgattgcaattcatcatgacgccctttcgcatcatttaaacgaccttcaatatactgacgtttctcttctaaaatatctttatttttcaaagcttgttgccagtgatcacgaatgcgatattgctcatcaagatcaaaatctaagtcatagttttcatctaaaatggctagttgttctttaatttcttcgatttcatctgtgatggcctcgctataatctacttcttttgatttagacatgatgataccgataacaaatactaaagttaatactgcgaaaataataccaaacaacatgttgtttgaaataaatgagaaggcagttaaaccaatacctactaatgttaaaagaataaacgttgttcgtaacaatttttgacgtttttgtttttcttgttgctcaatttcgaaacgttctttcaatttgctatacaagttctctttttcgtttaattcaatgacttgttgtgagtattcttttttcttttcaaaagtctcttcaggaactattttttcttcaacagaatctagttcgctatgaaccgcattatcttcgattttattttcttctaaactacgttctaattgcttaatgtatgccgcttgttcttgtttattcttgatttgctcactgacataacttttcattgcctcagaactatctacgtcatgatgcgtttcagaccaaccaatatttgcttgcaattcatctttatcacgttgtttattcgcaatatccttttcgattgcagtaagttcaaattctttatttttaatttcattttcttgttgattcaaactaatgaaggcgtcaatatcagattgtttaactggctctaattgagtcgcttcttctttaagttgagctaaacgctcatttcttaaaccaatatctctttctaacgattgcttatgcgctcgtgctttttcgtaacgatccacacctttttctgggaatgtgattggctcaatatttaactgttgttctagagacttccattcttgtgaatgatcatgtaaagcaacctctttttgtttttcttcatgcatttttgataattgatttaaattatgctttaaattctctaatcgacgtgatgatttatctcgatcatctactaagcgatgatatgtttctagtttagcttcttcttcacgaatttgactttctagttgttttaattgctcaatttgttgattaatgattggatttttacctgattttttatataattcatcttttttacgattaatcacttcgcgcattgacgtgaattcagttgatcctaaagcccctgcttgtaataaataatcttgcaattgtttttcatttaggtttctatgaatgtcttgaagccctagtacatcaaatgaaaagataccttgatatgtctttttagaaatataattaagtttcttttgtaaccaagcatcatcacgcacagcaccattaggtaaatatactttcacatcaccttgagcactgcctttaattcgttcaacttcaatctctaagccatcatcaagaataagtactaatttaccaccgtattggttacctagacgtggttctagtcttggctctttagactttttagttggaaaaccaaataatatcgaatggatgaatgcttgaatcgtcgatttacccgcttcattttcaccaaaaatttcagtgaagtttttattaaattcaattttacgttgaacaaattgaccgtaaccataaatttcaagtgatttaattatcattttgttcacctctcatttcagcttttaatatttcttcagcacgattaactaatgctgtatggtcgaatgttccataatcgtctaggaacttagatgcccttggatttaaatataagtctgacatcgctttatcaaaaacagtttgatcgactaataattccgctgaaaattcattaactaaaggtgactcatcattttgtgcatattgtatttttaactcatcaatatatacaaattgattttcgttttcttcataatctgtaatcatttcttcaacttgtaataaatcttgaggtgaaattaatgtctcactattaataacaagcgttaaacgataaaaggcttttccttcttctctcacttgttctttaaagttttgaatgacctcgtataaaccttgcttagatgtcttatccgtttcaatagttgcttcttcaaatctaatatactgtgtaggataaaatttagtttttaattttaagtggtcaccctcgattaataagcaacctttttcaccttgctcattaaaatgtctaccttgaatattacctgaatagttaattacaggcatatcacttaattgttgacgttcatgtatatgacctaaagcccaataatgatacaatttactgtttaaatcttctaaaatgaactcggtatatctttcgttaacagaagatttactgtacgtaccatgcaagacaccaatatgtatgcctttttggccttgacttgacggatattcatcaatcttgttctcataacttgctctattttcataactaaatccgtgaatataaattgtttcaccagatttagtaattgcttcatacgtctcaactttatttgaaaatacagaaacattatctggccagtttgatgaaatctttgatgataatgggtcgtgattaccatgacaaacataaacaaagatttgttcattttgtaaacgttcaaattgctgttttaagaaaatttcagcacgtaatgttctgttttcactatcaaataaatcacccgcgataattacaaaatcaacatcttgttgtaatgcaatatctacaatgtttttaaaactttcataagcacttttttgaacatcctcaaaaattttagggcttatatgactcttagatttgaaaggactatctaaatgtaaatccgaacaatgaataaatttaaccatacatccatatctccttaattaaaggttctaacatcaattttgcaaaatccaactatacaaagcatactaatcactatattcatacttataggtgtagtgattcattagctgatttattaaaaccagtcgccatttttatttttatttcgttaaaaaattattatctacacaataataaagtgctttagtcaaatcgtgatgttttatttattaacaagtttattatttcttcattttaccataatacgcttcatatcgtcgatgaacatatgaaattgagacacatttataacagtttaaaattttatttgtagcgtacgttgatttttttcaaaaatttcagtcggaaatgcaatttccgtagttgttaacaccactagtgaaccaactgacacattaacgatttacatgtttactctactagatttgctcggcagtaatcaccaattagaagctaaatgtcaaaactatcattgcacttaatacgccaaacattttcaggccgttcttaatgagtcattaaaagtgaaacacttttccatcagtccaatacatgaccgaactaatagtattatgttgaaaactttacactccaaaatgcaaaaaggaagttaggacacgtttactagcctaacttccggtactgaaaacatcaccccaatttgacatagaacctctaacttctgttatcaagctcatccgcccgttttgtcatagagccaatattgtttgattgtccagcttccgtcgtccgttctgagctaaagctagacacgtttactagcctaacttccgatactgaacgcatttgcccaatttgacagagagcctctaacttccgttatcaagctcatctgcccgttttggcatagagccaatattgtttgattgcccagcttccgtcgtccgttctttgctagagctaggacatgtttgatagcctaacttccggtagtgaacgcatttgcccaatttgacagagaacctctaacttctgttatcaaaactaaaaaaactacccacaaagtctcggactctgtcggcagtctattcctctatttaaaggattgaaaaatattagtcagcgtaaatttcgtctaatggtttaacgataatttggttgatttcttggaatacttgactcattttttgttcagcattcattaatgcagagatgttttcatctttttcaattgcttgcgcttgttcttgcgctttttgtaaatcttcttcagcaatttcttcaccttgcatttgtttttgttggaagttaatttgagtttcacggaactcgtcgaataactttttagattcttcgttagcttttacattagcgaatgcttctttgattgctttgtattcttcgctttctcttaaagcttgttctaattgatttgcataatcatataaatttactgccatggttatagcactcctttgttgtgatgtttattaaaacgttcgatattactttaccacatctcgcttttttagacaaagattgcaaccaaaccttggaaaaatccaataataccacctaaaatgaaacctaatgacataatcaactttagttctttgttagcaatttctataattaatttttcaatataatctaagtcaaacgtattaatttgttcttcaattaatcctcgtaaatccacttttttcataattgcagataagtgaatcgataattgttcaatgattaaatttgctaatttgctagagagttgaccttctaaataatcaacgaattgaggcattaatgtaaccactggcttattcgcttgtttgcttgcatatgttgttacatacactgatagattttcagcgatttcattaaactgcgacgcatctaacagttcattcaatggtttatctttaaaagtttgatattcattggtaattaacgatgtcacaattgctcttgctttaggatgagatgttaaacgtataagttcttgttgaattcgatctgcaatgctctcttttgtcataaacatttgcaacataccaattaacttacctttctcattgaaaaaagtatccaacatatcattaatatcttgtgtgccttttgcagatgataaataatttcttgcacgatcacataataagtctgttgcgttatctacatgctgatctaaaaatgttacaagttgatttggcaataaagatgctattgtttggttttgatgctttgtataataattattcaattgtgattcaatatattgatttccattagtttgtaatacttgttctaaatcaatatcgatttgagaagtaatttgttttattgacaattgatctttcgtcaccttttgtaactgctgttgaatcatagattctattgcttgctgtgattgctcgctttttaatttttcattaattaaagtttctgtaagcaaatgctcttcaatcacttggccaattttagttgcaatttcttcgcgtcttttcggtattaaacctggtgtaaatgggactctaaatttaaatatatagtatggtttaaaggggtgaaacagcattctaattgcaattacattagtaatgccaccaattatcgcccctactacaatcataaatatgataataaatagtgcattcataattttgactcctttgtgacaacatagttattcattataccactatttttattttttaattcattaatcatttcactttctgctcaatttattattagtttacatacaaaaagcgatgcctcacctctcgaaacaggtgtgttacatcgcttttattatttattaaaagtatataggcctagatatgtactaattcttctttagcatttctgttaaagtatgtttcagcttctctcattttagaagtaccgaaaattggttggttatctggatttaatacacgataaatattgcttactttgttactttgtaaaatgtacccattacgagtctcaatgttattccaataaatatcacttgttggtgcatggtttggatatgcacagtgatttcttgaaattgtttgaacgatttctaatggatcacagccaaatgtactgtttaatacttcagagtctctgaataatgcacaaattgaaatacaagttgtccagtttggtaatactctctctttttcgatttgtactaaagtctttttagaaagtccaattgtttgcgccatagtatcttgcgtataaccagcctctatacgaaccattttaaattttgtttgaattaaatctgtaaaactctgtctatccattctgttatctacctttctgtttggggaattttatccggacacaagaaattgcaataatacacatttcttgaaacacagattacatcttaatatatttttaataaaatgaaaagagtcaatttcacatttgtattaaattttgatcaagtcaacaagagttaagtttactttataatgaagtgaaagtaaatgaagtaaaattttatgcataatcactagatttgataaaacttacacttttataatgatatcaaatttacaaagaaaactgtataataaaccctatcgctataaaaaaatcatcaaaatcagattaaaaattgtctatttttcgacaaatatttaaaagctcattctaaatcaacttattttccattgcataaattgctgcttgtgtacgatcgctaacttgtaatttactaaatatatgactgacatgtgttttaattgttttttcagatacaaataaagtttctgctatctctttatttgttttacctttaaccatttcacgtaacacttcaatttctctctttgacaacttattcgtgtagtgtggtttttggctaactgtttcgaatacatcttgtgccttaggatgtatcattttttcaccgttcataactcgtctaatagtttcaattaattgctgaggctcaacgtctttcatttcataaccatcagcacctttattgattgctgaaattacatgttcatcatcaacataacttgttaataccaaaactttaatatccggataatgtgccttaatatattccgtaatttcaataccattcatgccaggcatcactaaatctaatagcacaatatcagggtgctcatgctcttttaaatattctaaaaatgtttctccatctgcaaagtcttgtaaaacttctatgttttcaatcgtggataataaaaatcgcaatccttgtcgcacaatatgatggtcatctactaatattactttgttcatgggttatctccttaaatcaagctattttataggaattgtgaattgtatttgtgtaccctttgttggctgagaatgaaaggtcactttacctcttaataatttaactctttgttttatgttatttataccgtgtgatgaagctatctgaacattatcaatctcaaatccttgaccataatcaatcacgtcaatatatagtatatcgttcatttgttttaatgtaagatccattttattcgtatcagcatgtttcttaacattattaatacactcttgtaatgctctgtatatgttttcttcgatttcattagataaatcgattaaaccttctacatttacatttaattgtatatgcattaatttactatatgctgtcaaagcatgaattaaaccttgctcaagtccaactggcttaagttgccaaatcaatgcacgcatttcattaacggcattttgactcgtttcctcaatcgtcttgaatgcttgtttagcgatggattcgtttgacacgccatacgcagcatgtgctgttagttttacagaaaataacatttgatttactgaatcatgtaaatctctagctaaacgattacgttcattaatttttgctgcttctttttcacggtctgttaaataaatacgtttgatggctgaccctaattgaaatgcgacagactctagcaactctaaatcttcatcactatatatttcagtatttggtgacgctacatttaaaatgccgaattgttcttgacccgatttaagtggtaccgttgcatgatgtgtaatattgtcattttggctaggaaatgctttagaggctaagttaatacgagaacaattgacgatattcgacgctttcattagcctacgttgattaaatgctttcacacaccaacaagacccatctttaatatagtgacagtggtctgctgtcaaagattgtggtaaagccacatgtgatacaagttcatgttcacctacgctattgatgaaaaatatccagcctgtcgtgaaattactgccctcaattaaatattttaaagcaccttgggtcatgctatacatttcagtttcttcgtttaaaaattcggcaatctcttttaataaagctagtcgcgtcctttgttccatcaaatcgctccaattcatttttacgtgtattaactattatacattgagttattatatttttaaatcttagacgtgaacatgataaaatggccttgattacttaatagttatatttcggagaactgatttgtgatatgatattaaagactataggaggattttatgaaatttaaaataccagaaaactttaatgacttaagtttacgagatattttccaacaacttaaggtacctaaaaaagatttacatcatttaaatatgtctaaagatattactattaatgataaacctgcgcgattaatgaataaagtgcatactggcgacgatgtatttgttccaaccatcgatgaaaaaagtaattatgttccaagttatcgttatgcacaaattaaatacgaagacgatgatatggcaatcgtaatgaaacctaaaggtgttaagacccaccctaatgatttaaaagaaagcaatactttaatgaatcatgtgatttacactattgatagtgactatgtcgaaccaattcatcgactggaccaggaaacagtaggattattaattgttgctaaaaaccctttaatgaaaaaaattcttgatcgcatgttagaagacaatgatattacgcggatatacaaagcaaatgttaaggcacttttacctttaaaaccacaaacgattgatatgccaattggtaaagataaattccattcgaataaacgacgtgtgtctcctactggacagcgtgcaattacacacattttaacttcaaaaatgataaaagaaactgtgtgccaacttgaaatcaagttggatactggacgtactcatcaaattcgtgtgcatttagctgaaattggccacccagttattggtgatcctttatacggtgattcaacgttaagacaattagaacttgaaagttacaaaatagagtttgtgcatcccttgactaaggaagtcatttccgtttctttggatgactaatttgtttagtttggcatgatatttaaatatgcaatactgcattgtaactaaatcaagtatcaacttaaatcggatagatggaaaattattaattttttcagatgttcggtttttttatgttttttacgatgcttaggattttatattttgatattttagtaatttttcattttatagcatccttggatattttcaactgcgttacgtgtatctatggacaatacatgacatcataagatttttatcacaggttgtttggccaatacatgtacaacaattcatcataaaaaaaataggttctataataaaacggactccatgaaaagttttttctttcatggctatatatcaaatcggacttataagttcaatttgacatagacaaaaaaataaagcttgaacactacatctacctgtaatgcccaaactttattttatattaatatttaattaatgaggatctaccatatcttctggtttaatccatgcttcaaattgttcttctgtaacatatccagtttgaattgcagattcttttaaagttaaaccttctttatgggctttcttagcaatttgagcagctttttcataaccaatatgtggatttaatgcagtaactaacattaatgattgatttaaataattatcaatattctcttcgattggttcaatgcccactgcacaattgttattaaatgtttccataccgtcagctaaaaggtaaattgattgtagtgtattatgcataataactggtttataaacattcaattcaaagttaccttgtgaacttgcgaagccaacaactgtatcattacccattacttggactgcaaccattgttaacatttcacattgtgtaggattaactttaccaggcataattgatgaacctggttcattttcagggatagaaatttctgccaaaccagctcgtggtcctgaagccaaccatctcacatcattagcaattttcattaagtctcctgctagcgccttcaatgttccgtgtagttgtactacttcatcatgtgctgttaatgcatggaatttattttcagaagatacaaatggataacccgtattttctgaaatataatgtgccactttatcaccaaattcaggatgcgcattaataccagtaccaacagccgtaccaccgatggcaagatttaaaatgtgcttcttagattcagataacattgtttcgcaacggtcaagcatataacgccagccactaatctcttgtcctagtttgatcggtgttgcatcttgtaaatgtgtacgaccaattttaataattgaatcaaatttatcttctttttctttcaatgtatttcttaaaagttttaatgcaggttctaattttgtttcaacctcttgatataatgcaacgtgcatagcagttggaaatgtatcattcgaactttgtgatttatttacatcatcatttgggtggatactttcatcactttgatgatcttttaaatacatattagcaacataacttactacttcgttcacattcatattactttgtgtaccgcttcctgtttgccatacaactagtgggaagtgttcatctaattcacctgataaaatttgatcacatgcgtatacaatggcatctttctttgcctcgcttaattttcctaaatcaaaattagctaatgctgctgcacgctttagttgtgcaaaaccataaactacttcgattggcatacgctctttaccaactgggaaattacgtttacttctttctgtttgagcaccccaatatttatctgcaggtacttctatttctccaaaagtatcatgttcaattcttactgacattcaatttctccccttatcactgtttatttaactgtagtatatcattaaataatttaattgagcaatttatgattaaaacgttttcataatttgaaataaaaatacactaatcgcacatgcccatcctttattacagagatacggtcatacgattagtgtgttatctatcattatttagttattgttgaactaagtttaattacgatactttgttttagtagcttcaaccgtagcaatagctgtaagtatatataatacagcactaacaattgtcgtatatggatttagagcaacaagcgtacctaatactcctgttaaactcgcataaaacccatcaagtgtataatacaatattcctgttattaataaacaacaaattacacttattacaatacctgattgattacttttaatgaatgtttgcgcattaacatcatcgattaatccttttgataaattgagttgtaattttattactttgaaaataacaggtaaatataatgccccaattgccaatggaaaagctttaattgatattaaacttataataactgttgctatcaataattgaatccagtattttcctaacataaatatataaatctcctctaatttcattcttcaatagcatatcataatcttgacatattaagaaacgcggtttaatgatttcattaaaaatattaatgatagatgacttctttcaattatgtctggggtatttaattatcaattccgtttaaatgttgttttaatatttaaaattgaatttttgatatattactatgtctggtacacaaatcaatgttttatgctttacaaagttatattggcagtagttgactacgggccacaacatagaagcttcggtatgtcagcttactatttcatgcaagttggtggaaagtcagttttcaataacgtgcaagttggcggggcctcaacatagtgaaattggatcctcaatttctacagacgatgcaagttggggaaacggccccaacatagtgaaatcggatcctcagtttctactgacattgcaagttgggggccacaacatagaagctggcggaaagtcagcttagaataacgtgcaagttggcgggcccaaacatagtggaattggatcctcaatttctacagacattgcaagttggcggggcctcaaactcagaagctggcgaaaagtcagcttctatgaatataataaaaaagctaggtaacaaaatgctacctaacttcatattcaagattatcaatcctatttgatataggttctacaatattcattgtttacatcataaatagctgaatattacacaattataatactttactgactgtcttcttcagaattcttttcttgatcattttgatcagaaatttgttccatttctttacctaattcttttaaatcttcaaaatcagttaccatactgttttcttcttcatgataatttaattttggatctttgtctttagacataatcaatacctcacagatttttaattaagcaaagcgtgacgtaaagtaagctttaacatcttcaggtaaacctgcagccgcttctttatcaagaataacatttaccattctatgtgcttttaaatcagctggttcgaagcttgttttaccattttcttgatataatttttcaactacatctcgtttattagcaccagtcactactaagaaaatttctcttgcttccattagtccttgacgaatactaacatttaacttaccttgctcatcgatagaaacaacttgtaatgttaatttccctttattttctttagttttaatcttatcagcgattaattcgattgcatctttttcataagcaattggataaacttgacctgctggtacacctaacgcttcgaaatatgattttttatcgtcataatctaaaatatttatttggctaaaatcaacagcatgtttttcaatatttttctttaattcatctagtactggcgcttgatcagtatctaaatgaaaacctgcaattgtagtaggattattgttaaattgctttctaataatatcagcagcatattctgctacaagttgactattgtcaaagactttaaagttcattgccatgatttctacactcctcttagtttgcattttacataaaaacggcgatattaataattattataccctaactttcaatatatcaaaccatttaactttaacatgcttatactctaaatatagcacttaagcatcatttttataatgaaaatgagtaaattttaattcaatcctggaaaatcttgttgacgtaacgcttcataaattaacaacgcagcagtatttgataaatttaatgaacgaatatgttcgctcataggaattcttaacgctgtgtcttgatatttctctttcacccagtctggtaatcctgtcgtttcttttccaaaaatgaagtaaaaatctttgtcatgatttgaaaaatcaaaatcactataagtctttttaccaaattttgttaataagtaatactcgccatttgtggcttcaaaaaatgcttcaatactatcatgatacgtaatattcacaaattcccaataatctaaaccggctctttttaacattttatcatcagttctaaatccaagaggtttaattaaatgtaaatgtgtgtttgtacctgcacacgtacgtgcaatgttaccagtattagctgggatttctggttgatataaaacgatatgatttgtcatattactattctctccttgtgtccaatccttttatcatttcattctgaacttctgcatcctctttatcgtaatttgcattgataaaatctcttgcttcttccccaagaatttgaccaatagcccaataagcagttgctcgaatcatcggtctttcatctgttgttgcaacttttttcaattctggaattgcatccacttcattaaaatgcgccaatgctaaaatagcatttcgttgtatcggttttttaccacgccaagcacctgcaaggtgaccatatgtttgtttgaattctttattagacatacgtagtaaaggtactaatcttggctttaaaatttctggttccaaaatgatgtcatcttgttcggtattaatacctctatttttcgggcaaacttgttgacacgtatcgcaaccatataatctattcccaattttataacgatattggtcaggcatatagccttttgtttgcgttaaaaaactaatgcatttctgactatttaattggccatttccaactaatgcacttgttggacaacgatcaacacaaattgtacaatcaccacagctatctaataatggatcatcaggttcaaaaggtatactgactaacatttcaccgaggtatgtccatgttcctagtttaggattgatgacaaagccattacgaccaacaaatcctaaacctgctcgttctgctactgccctatctgataatacacccgtatctaccatagatttgatttcaacatctggaactttagattcaataaatgcagctaacatgtctaatcgtttacgcataattgtatgataatcttgaccccacgatgctctagcaaataagcctctgcgatcacctctaacactcttaggtgcacctttcagtttgttaggataaccaactgcaattgctatgattgaccttgctgttggtaaggataatttaggctccgttcgtaaagcaatatcagattcttcaaatcctgaggcataaccatttgcatgatatgcttctagcttttgcttcaattcatcaaagggatcggcagtagtaaatccaatactgtcgataccaattgtatatgcatagtcaatgatatcttgctttaactgctttgtatccaatcgtatgccccccataaaataatactatgttattttaacacaaccattattcatattgaggtttcatttcacataattttaataataaaaagcttgaatatatgatataactttgtggtgcgtatcatatattcaagcttcgttaggttattataatactcttgctaagaaattttgtgttctttcatgttgcggttgttcaaatatttcgactggtgtgcctgactctacgacaacgccatctgccataaatatgactttgtcacttacatctttggcaaatcccatttcatgtgtcacaaccaccatggtcataccttctttggctaggtctttcattacttttaatacatcaccaactacctcaggatctaatgctgaagttggttcatcgaataaaataacatctggatgcattgctaaagctcttgcaattgctaccctttgtttttgaccacctgataattgattcggatatacatctgctttttcttttaatcccactttatctaataacgacaatgcttccttatgcaattcatcgttattatctttctttaataatttaggagctaaaataatattatcgacaacttttttatgtggaaataggttgaagttttgaaataccatacccattttttgacgtagtttatctacttgtgtccctttttccgttaagtcattgccttcaaaaatcacttgacctttagtgggtacttctaataaattcatacatcttaacaatgtacttttaccactaccagatggacctattattgctactacttccccttgattgatttcaagattgatatcttttaaaacttcattatctccaaaaactttattaagattgtttattttaatcactggcattcaatctcccttcaatcatgttcataatgcgtgttagtacaaatgttaagacaaagtataatgctgctgccactagtaatggtgtgaatgggtcaaatgaaataccttgaaccacttgtgcattaaacataatttcgccaactccaattgttgacacaatagatgattctttaattaaagtgacaaattcattacctaaagctggtaaaatgtttttaattgcttgtggcataattacacttttcatcgtttgtctataattcaaacctagactacgtgcggcttccatttggcctttatcaacagcatttatacctgcacgaataatttcagcaatgtaagctgaggaattaataactaatgcaattgttccacaaacaagagctgaaatatctagtcctaatgcagcagttataccaaagaatacgataaatacttgaactaacattggtgttcctcttaatatttcgatatagatagaggcaatccatgaaataatttttattttacttaatttcattaacgcaacgaatgcacctaaaatagaacctaatgcaacaccgataagtgaaattaatattgtaatcttaattcctttcaagaaaaaactaccatacttagaaataaaaccactgtcatcattcatcgcatttgcagcattagtcatatatttatcgattaatcctttatctttaacctctttaatcgttttattaatttgtgacaataattttggtgaatcttttggcactgctatcactgtatctttttcttcttcattaaatttcacattggaaattcctaatttaggattttgttttaaatatgcttctgctacaggtttttcaactacagcaccttcaacctttccacttttcagagctaatataacgtctggtaaacggcttaatgaagtaatagatgcattttcaatttcggtttgagcgattttttcttgttcagttcccttttgtgcccctacttttttattattaaagtctttgatatctttatattcattaactttatctttctttacaagcatgatatttttagtcatcatatatgaatctgaaaaatcaacttgcttcttacgttcaggcgttgaagtcattccggaaataataatatcaatttttccagttttaagagctcctaacaaactatcaaatgacatattgacgatttttaattttaaattattatctttcgcaatttttttagctaaatcaatatctacacctgcatactcagtcttaccattaactgtatgctcaaattccattggtgcataatctgcagaaagacccactctaagttcaccgcgttctttaatcttctcccatgcttgatcttgttcagcatgtgctgtgggattgatatacaccatagcactgctaattaacaaccctaatattaatataaacctaattaaacacttcatttatgcagccctccctaattaatattcataattatacatattaatacattttgatgcaatagtgttttataaatgtatttttatcaatataaagaaaagcttctttttaaaagacttaacttaaaaaatccctattatacgcgaacaattcttacattttaaaatcaatcaaaaaaagcgctactatcaatatcttattgacagtaacgcctatatttatcatatatcaaaacttattcttgtcatcaagctataaattattgttttggaacttcaaatttataaatatcattggaatatataggaatgaattttttacacaattcatgaacaataaacgccgatacaaatggtatgacaaaataaccaagagctaataaaataatattcattgttggatcacctgacattcggttaaatgcatttattgggccaactaatcctgtatatccaaatccagcagacaatggtgttcctttaacctgaagaacgtaagcaatgattccagtaattattccatttatagtcaatggtatcgaaataattaaatttttcaagtaaactgggatcatcatttttgcagctcctatgagtaaaactgcatttacaccaatagaattgacacgcaatgagccgaataagaaagtaacacaggcagccactatacctaagtttgctgctccacttcctagcccgtttaaactaatcgcagttgcaatcgctactaacgatattggtgttaccattaataatgaaaatgccacactaataagtatagacattaacaacggatttaactctgtaaaagaatgaattacatttccaattgcttgagtaatttttcgaatgtaaggtaatgtgattagaccgatacccccactaacgataggtactaaaactggtaaaataattaattcaaaagatccaagtttgttttgtaataccatatatataagacatgcaataataacaaccaaactcgtatttataatgtcacctataccttttaacataaaactattattgctatatacaacagcacctgaaccaatcatagctgatgtacctactatagcagcacctgcgccattaaatttaaattgatgagcagctaaaaccccaataataaatgccataaatgattgaattagtatcactaactgatacgttaattctaaaatttcattaccacttttaaatatttttaatacttcacctaataaagcattcggaacaagtgcaataacaacaccagcaccaatagaatttaaaatcttactgaaaaactgtttattatcagcattctttgcgttactcataaacgacctccaatttgaacattaaattcatcatattatagaaaattaactttaacaatgattagttggctaatttaatctaaatataacaatccacaaaaggaataaagtaaatttgaacaatctactcagtaaacaatgtcatgttaattttaaaatactactaattacatcctgtgactaataatgtaataaattgtaaataataaaatagccatattacttttaagatagataaattgattcgacttgatataaagcagattaaaatagcacttttacaaatattttattagaaaagttaaaacaaatacataaccccagataatatagtcattatcattaatgtaataccaaaaaaagaagttaaacaatctatagttgcttaacttcctatattgaacgcatcattacaatttgacatagagcctattaaagcgtttgccatttgagtgccacttttatttgtattgtacaaagagaaataaaaagaaaccttgttttacaaggtttctagtacgttatgttatgtaaataacagttaatataccggtggtcggggtcgaaccgacactccacaagtggaacgggattttgagtcccgcgcgtctgccaattccgccacaccggcttaatggtaaacaaaaaacttccctttggaagcaattatggagcggaagataggatttacacctatacctcgttccgggaaggaacgtgttctaaaagttgaactactcccgcaaatattaaattatggagcggaagataggatttacacctatacctcattccaggaaggaatgtattctaagagttgaaatactcccgcattattattaaattatggagcggaagataggatttgcacctatacctcgttccgggaaggaacgtgttctaaaagttgaactactcccgcataaacctggaggcggcaaccggatttgaaccggtgataaaggttttgcagacctctgccttaccacttggctatgccgccaataactgggctagctggattcgaaccaacgagtgacggagtcaaagtccgttgccttaccacttggctatagcccattaataataagggcggctgaaggggatcgaaccctcgaatgtcggaaccacaatccgatgtgttaaccacttcaccacagccgccatggcaggggcagtaggaatcgaacccacaccaaaggttttggagacctctattctaccgttgaactatgcccctattaaaaataataaatggaggggggcagattcgaactgccgaacccgaaggagcggatttacagtccgccgcgtttagccacttcgctacccctccataaatggtgccggccagaggacttgaacccccaacctactgattacaagtcagttgctctaccaattgagctaggccggctaagaaatggttcaggacagagtcgaactgccgacacatggagcttcaatccattgctctaccaactgagctactgaaccataataaaaatgtaatgatggcggtctcgacgggaatcgaacccgcgatctcctgcgtgacaggcaggcgtgttaaccgctacactacgagacctataaaatattgcgggaggcggatttgaaccaccgaccttcgggttatgagcccgacgagctaccgaactgctccatcccgcgataataaaaaataatggcggaggaagagggattcgaacccccgcggcccgttaaggccctgtcggttttcaagaccgatcccttcagccggacttgggtattcctccattattataggtaaatcgctattaattataaaattaaatggcggtctcgacgggaatcgaacccgcgatctcctgcgtgacaggcaggcgtgttaaccgctacactacgagaccattagtaaaacggaggaagagggattcgaacccccgcgagccgttaagcccctgtcggttttcaagaccgatcccttcagccggacttgggtattcctccaaaattatatggaccttgcaggactcgaacctgcgaccgaacggttatgagccgttagctctaaccaactgagctaaaggtcctaaatataattttacaactaataaatagtggcggtggaggggatcgaacccccgacctcacgggtatgaaccgtacgctctagccagctgagctacaccgccttatatagtttgtaaataatatggtggagactagcgggatcgaaccgctgacctcctgcgtgcaaagcaggcgctctcccagctgagctaagcccccataataattacagtatatcgggaagacaggattcgaacctgcgaccccttggtcccaaaccaagtgctctaccaagctgagctacttcccgtataattaacgcgcccgataggagtcgaacccataacctcttgatccgtagtcaaacgctctatccaattgagctacgggcgcatatgtttttattgaaaatggtgccgaggaccggaatcgaaccggtacggtgatcactcaccgcaggattttaagtcctgtgcgtctgccagttccgccaccccggcactataaaaatggagcagaagacgggattcgaacccgcgaccccaaccttggcaaggttgtattctaccgctgaactacttctgcatatgcgggtgaagggagtcgaacccccacgccgtaaggcgctagatcctaagtctagtgcgtctgccaattccgccacacccgcaaatggtgagccatagaggattcgaacctctgaccctctgattaaaagtcagatgctctaccaactgagctaatggctcttccatggtgccggccagaggacttgaacccccaacctactgattacaagtcagttgctctaccaattgagctaggccggcaatatgtaagaataaatggtggagaatgacgggttcgaaccgccgaccctctgcttgtaaggcagatgctctcccagctgagctaattctccgatttaaaactgcctggcaacgttctactctagcggaacgtaagttcgactaccatcgacgctaaggagcttaacttctgtgttcggcatgggaacaggtgtgacctccttgctatagtcaccagacatatgaatgtaatttatacattcaaaactagatagtaagtaaaagtgattttgcttcgcaaacaattatttttgattaagtcttcgattcgattataattcatcagctccacatgtcaccatgcttccacctcgaacctattaacctcatcatctttgagggatcttataaccgaagttgggaaatctcatcttgaggggggcttcatgcttagatgctttcagcacttatcccgtccacacatagctacccagctatgccgttggcacgacaactggtacaccagaggtatgtccatcccggtcctctcgtactaaggacagctcctctcaaatttcctacgcccacgacggatagggaccgaactgtctcacgacgttctgaacccagctcgcgtaccgctttaatgggcgaacagcccaacccttgggaccgactacagccccaggatgcgatgagccgacatcgaggtgccaaacctccccgtcgatgtgaactcttgggggagataagcctgttatccccggggtagcttttatccgttgagcgatggcccttccatgcggaaccaccggatcactaagtccgtctttcgaccctgctcgacttgtaggtctcgcagtcaagctcccttatgcctttacactctatgaatgatttccaaccattctgagggaacctttgagcgcctccgttaccttttaggaggcgaccgccccagtcaaactgcccgcctgacactgtctcccaccacgataagtggtgcgggttagaaagccaacacagctagggtagtatcccaccagcgcctccacgtaagctagcgctcacgtttcaaaggctcctacctatcctgtacaagctgtgccgaatttcaatatcaggctacagtaaagctccacggggtctttccgtcctgtcgcgggtaacctgcatcttcacaggtactatgatttcaccgagtctctcgttgagacagtgcccaaatcgttacgcctttcgtgcgggtcggaacttacccgacaaggaatttcgctaccttaggaccgttatagttacggccgccgtttactggggcttcgattcgtagcttcgcagaagctaaccactcctcttaaccttccagcaccgggcaggcgtcagcccctatacatcaccttacggtttagcagagacctgtgtttttgataaacagtcgcttgggcctattcactgcggctcttctgggcgttaaccctaaagagcaccccttctcccgaagttacggggtcattttgccgagttccttaacgagagttcgctcgctcaccttagaattctcatcttgactacctgtgtcggtttgcggtacgggcacctattttctatctagaggcttttctcggcagtgtgaaatcaacgactcgaagacacaatgtcttctccccatcacagctcagccttaacgagtaccggatttgcctaatactcagccttactgcttagacgtgcaatccaatcgcacgcttcgcctatcctactgcgtccccccatcgattaaaacgattataggtggtacaggaatatcaacctgttatccatcgcctacgcctgtcggcctcagcttaggacccgactaacccagagcggacgagccttcctctggaaaccttagtcaatcggtggacgggattctcacccgtctttcgctactcacaccggcattctcacttctaagcgctccacatgtccttacgatcatgcttcaacgcccttagaacgctctcctaccattgtccaaaggacaatccacagcttcggtaatatgtttagccccggtacattttcggcgcagtgtcactcgactagtgagctattacgcactctttaaatgatggctgcttctaagccaacatcctagttgtctgggcaacgccacatccttttccacttaacatatattttgggaccttagctggtggtctgggctgtttccctttcgaacacggaccttatcacccatgttctgactcccaagttaaattaattggcattcggagtttgtctgaattcggtaacccgagaggggcccctcgtccaaacagtgctctacctccaataatcatcacttgaggctagccctaaagctatttcggagagaaccagctatctccaggttcgattggaatttctccgctaccctcagttcatccgctcacttttcaacgtaagtcggttcggtcctccattcagtgttacctgaacttcaacctgaccaagggtagatcacctggtttcgggtctacgaccaaatactaaacgccctattcagactcgctttcgctacggctccacatttactgcttaaccttgcatcaaatcgtaactcgccggttcattctacaaaaggcacgccatcacccattaacgggctctgactacttgtaagcacacggtttcaggttctatttcactccccttccggggtgcttttcacctttccctcacggtactggttcactatcggtcactagagagtatttagccttaggagatggtcctcccagattccgacggaatttcacgtgctccgtcgtactcaggatccactcaagagagacaacattttcgactacaggattattaccttctttgattcatctttccagatgattcgtctaatgtcgtcctttgtaactccgtatagagtgtcctacaaccccaacaagcaagcttgttggtttgggctcttcccgtttcgctcgccgctactaagggaatcgaattttctttctcttcctccgggtactaagatgtttcagttctccgggtgtgccttctgatatgctatgtattcacatatcgataacatgacataactcatgctgggtttccccattcggaaatctctggatcaaagcttacttacagctccccaaagcatatcgtcgttagtaacgtccttcatcggcttctagtgccaaggcatccaccgtgcgcccttaataacttaatctatgtttccaccatttttataagtcaaacgttaacatgaagttacattcttttataaaaagatttaaacgcgttattaatcttgtgagtgttctttcgaacactagcgattatttcttatgaattcaagcttatttaaaactctttattcactcggttttgcttggtaaaatctatattttacttacttatctagttttcaatgtacaaataatggtggagactagcgggatcgaaccgctgacctcctgcgtgcaaagcaggcgctctcccagctgagctaagcccccaaacaggtattaaattaatggtgggcctaagtggactcgaaccaccgacctcacgcttatcaggcgtgcgctctaaccagctgagctataggcccattaatttgaatgaacaaacattcaaaactgaatacaatatgtcacgttattccgcatcttctgaagaagatgttccgaatatatccttagaaaggaggtgatccagccgcaccttccgatacggctaccttgttacgacttcaccccaatcatttgtcccaccttcgacggctagctcctaaaaggttactccaccggcttcgggtgttacaaactctcgtggtgtgacgggcggtgtgtacaagacccgggaacgtattcaccgtagcatgctgatctacgattactagcgattccagcttcatgtagtcgagttgcagactacaatccgaactgagaacaactttatgggatttgcttgacctcgcggtttcgctgccctttgtattgtccattgtagcacgtgtgtagcccaaatcataaggggcatgatgatttgacgtcatccccaccttcctccggtttgtcaccggcagtcaacttagagtgcccaacttaatgatggcaactaagcttaagggttgcgctcgttgcgggacttaacccaacatctcacgacacgagctgacgacaaccatgcaccacctgtcactttgtcccccgaaggggaaggctctatctctagagttgtcaaaggatgtcaagatttggtaaggttcttcgcgttgcttcgaattaaaccacatgctccaccgcttgtgcgggtccccgtcaattcctttgagtttcaaccttgcggtcgtactccccaggcggagtgcttaatgcgttagctgcagcactaaggggcggaaaccccctaacacttagcactcatcgtttacggcgtggactaccagggtatctaatcctgtttgatccccacgctttcgcacatcagcgtcagttacagaccagaaagtcgccttcgccactggtgttcctccatatctctgcgcatttcaccgctacacatggaattccactttcctcttctgcactcaagttttccagtttccaatgaccctccacggttgagccgtgggctttcacatcagacttaaaaaaccgcctacgcgcgctttacgcccaataattccggataacgcttgccacctacgtattaccgcggctgctggcacgtagttagccgtggctttctgattaggtaccgtcaagatgtgcacagttacttacacatatgttcttccctaataacagagttttacgatccgaagaccttcatcactcacgcggcgttgctccgtcaggctttcgcccattgcggaagattccctactgctgcctcccgtaggagtctggaccgtgtctcagttccagtgtggccgatcaccctctcaggtcggctatgcatcgttgccttggtaagccgttaccttaccaactagctaatgcagcgcggatccatctataagtgacagcaagaccgtctttcacttttgaaccatgcggttcaaaatattatccggtattagctccggtttcccgaagttatcccagtcttataggtaggttatccacgtgttactcacccgtccgccgctaacatcagagaagcaagcttctcgtccgttcgctcgacttgcatgtattaggcacgccgccagcgttcatcctgagccaggatcaaactctccataaaaattatgatgtttgattagctcataaatactaaataatgtttgtaacttatagttacgtttttggaattaacgttgacatattgtcattcagttttcaatgttcgtttgtcacttacaagatttaattataactcgtaagtttttgtaagtcaagaattatttttaattattttatttctaaaaaataaatttcctaactcaattaattcaacaaatattattttattatgtatttgttcgaatttcaatagtcaaatttacactttattaatattttaaatcaacaacttaaaacatttgttttttaaatattagtgccgtttgacgacttttatataatatcaagttattttagtagagtcaacataaaacaacacttatttttgtttaaaaattactgttgaagggattattttctattcgtaagtactatatgtatctaaagtgtaattccttacgctttttacttcagttttacaaacaaacttatcctcactttatggatagttatttagtaaaccttcgtttgaatatttttatgtttatttataaaggatactagttattagttaatacaacttccgtagttagaatgttcttttcttctatttaaatatttttcagaataagcataaaaaagaagttaaacaactttcatgtcgtttaacttcttaaatattacgcttacttatatgaagtaagctaacgattttttaatttgtcatactaccaaagttaaattatttatcttggcattctttacaaactccataaatttccattcgatgatgtgttacgtcaaagtcagtcatatgctgagctaatctttcaatttcatttaactgtggatattgaaaatcaacgatcttaccacattgttcacatataatatgataatgattatgtgtattaaagtcgaatcgacttgatgagtctccatatgttaattcttttacaattccaatatctttaaacactcttaagttattatatattgtcgcaacacttatatttggaaaatcaggtgaaagtgcttgataaatttcatcagctgttggatgagtatgtgaagaaattaaataacgtaatattgcttgtctttgaggtgtaattcttacgcctgcttgtcgcaatgatgcaattgattcttctagttcatgttcaattgattctatttcaacactcatctatatcaccatctttcttatataataattattattacttactataaatataactgtagtattgcgcgcgtgtcaatatttacatgatgatttcatttaatagccttttttagcatcgacttcattctcaattagaccattcttattgagaaaattaactagattgtttttaaaaatatctaataagtcatactttgcttcataatcattaccagttatatgcgctgttatagttacattatccaattcatataattcatgattaggtttcaaaggttcattttcaaacacatctaaatatgcatgtcgaataactctactttttaatatttctattaagagcggttctttaactatgctacctcgtcctatatttataaaaagtgcttcatctttcattaattcaaaatgttttttctttagtaaatgaatcgtttcttgcgtttctggtaaagcatttataacaatgtcagcatttggtaatgtgctttcaagtgattcgatagtatatatctcatcaaactcatctttgttctgacctgacttactcagaccaattaaattcatattaaaagcctttgctaacttcgcagttttagtagcaattgcacctgtacctaaaaataaaactgtttgtcctgaaaggcgtttaccagttattttcgaatcatatatatgttgtcgttggttatcatatgatagcttcatctttttataatcatctaaaatgaaagctaaaatgtattcagataattgtttagcttgaacaccttttccattagttaaaagtatgccgtgatctgcaatataatctaacggtaacgtatttacacccgttgcaaaccatgcgatccattttaaatttggacaacgtcgtaaaaatgcctcattgataccgccatcataaccaactaatatatctaaatcagccaagtcactctcaggtatttctgatgcttttttataaaatttaaaatctacatctgaaaagcgttgttgtaattcagtttcaacttcacgcatacgattcaacccaacaactctcatatatgtcaccccaaaatgtttttaagttcttctatttgtgttttaactttaaccttctcgataacatctaatactttaccttgttcatctattataaaagtcgttcttacaatgcccatactttctttgccaaatgatttttttaactgatatacgccagtttctttagctaatttaaaatcttcatctactaataaatcgaaattcaatccgtgtttctcaataaaattttggtgttttttctttgaatcaccgcttataccatatactgcaacatctaaatcattgaacatttctaaattgtctctaaagtcacaagcttctgtggtacaagtaggtgtattatctctaggataaaaatatataatcgcctttttaccttttaatgtatcatttgtaatgacagttccgtcctgattttctaatttaaatattggaaattgttctcctttttgcaacatataatcacctttttcttcattataataattttatgatacgatattagatgaaaatattaaattaaaagaggttgatataaatgaattttagtgaaagtgaacgtttacaacaactttcaaacgaatatattctaggcggtgtcaattccccttctcgttcttataaagctgtaggaggcggtgcacctgttgttatgaaagaaggacacggtgcatatttatatgatgtcgatggcaataaatttattgattaccttcaagcatacggtccaattattacggggcatgcacatcctcatattactaatgcaattcaagaacaagctgctaaaggtgttttatttggtacaccgactgaactagaaattgaattcagcaaaaaattacgtgatgcaattccatctcttgagaaaattcgctttgtaaattctggaacagaagcagtcatgacaacaattcgtgttgcacgtgcatatactaaaagaaataaaattataaaatttgctggatcttatcatggccattctgatttagtattggttgcagcaggtagcggcccatctcagctcggttctccagattcagctggcgttccagaaagcgtagcacgtgaagtcattactgttcctttcaatgatattaacgcatataaagaagcaattgaattttggggtgatgaaattgccgcagtattagtagaaccaattgttggtaactttggaatggtaatgcctcaacctggatttttagaagaggttaatgaaatttcacataacaacgggacactagtgatttatgatgaagtaattactgcattccgtttccattacggtgccgctcaagacttattaggtgttatccctgatttaactgcatttggtaaaattgttggcggtggtttaccaattggaggctatggtggacgtcaagatattatggaacaagtagcacctctaggacctgcatatcaagctggtacaatggctggtaacccattatctatgaaagcaggtattgcattacttgaagtactagaacaagacggtgtttatgaaaaattagacagcttaggccaacaactagaagaaggtttacttaaattaatcgaaaaacataatatcacagctacaattaatcgtatttacggatctttaacattgtactttacagatgaaaaagtcacacattatgatcaagttgaacattctgacggcgaagcgttcggtaaatttttcaaattaatgttaaatcaaggtatcaatttagcaccttctaagtttgaagcttggttcttaacaactgaacatacagaagaagatattaaacaaactttaaaagctgcagactatgcttttagtcaaatgaaataacttttaaggaagtatattttaaattgaattaaaataaaacagatgctcacatagtagattcattttatatcgttaactattaacgtttaacttgatatgtcactatgtgagtttttattttacaaatttatactcttttaatctctgactaaagttttacatcgctatcagtattatgtatgatttattttaacaactataaataagcttgaattttgtaactagtaagtgtataacagtaatgaatacgaatattagatattcaataaacttaaaaggggcgtcattatttttgagactaggagctcggatttttaaaactggtatagccattattttagctatgtctatcgcttctttactacctgatgatgttggtctgaaagccttagctggtgtcagtgctgttgttgcaatgcaacctagtatttatcgttcatttaaaacagtttctgatcaagcattaggcaacattataggtgccatactttctgttacaatggtaacaatttttagcgataattttatcattatgggtgttaccgtcatagtacttattgctattttatttaaatttaatttagcacatgttgctactttggcgagtgtaacagcattaatcattatgggacaacataccggttctttctatattaccgccttttacaggtttgtacttgtaatgattggtgtcataagttcatctctagttaactttgtgtttctaccacctaaatttgaaacaaaaatttactataattcattaaatatatcctcagatatttttatgtggtttaaattagtattaaatgatacgacggagtttaataatattaaacaagatagtcataatttaaaacaacgtgtcgaaaagttagagaaaatttatgattactatagcgaagaacgtcctattacaaaaaaacatattcaccaacagaatagaaagaaaatacttttcagagaagtagttcagacgactagacaagcttatgaagtattaaacaaattgtcgcgttatcaaaacgacttatatttacttaataacaatttcctattacaaatcaaattagatttagattcattaactgcttttcacgagcaaattttagctagcctttctaaaaaagcacgttataatgtgacacatgttgattatgagttagataatccgcagaaaaaagatttattgtctacatttcagcatgagttaataaatcatccttatcaaacggaatattcgtttgccaatgttatgcaaattgttgcagccatcgaagagtatcgacaccatttagagcatttagaccgcataagaattagctttttcacatatcatagatctgatgcagacattgaaattgttgaagaagactttgatttataacattaaaacaattcctgtaattaaaccacaatgagataaagtaatattgaatctcgaaattaaatttaaaaaagcagtaagattattttcaattaagaaaatctcttactgctttttctatgttatgaccccaccatcctgttacaaatcttccctacaaaattgtactgaagtcaaacaactaatactttataagttttgaatgctatataaatgctcgtaagcaccttgttttgcaatcaattcacgatgcgtacctgtttcaacaatatgtccattttcaattacgacaattttgtcagcatgtgtaatagtagacaagcgatgcgctacgataagtgtcgttcgatctttactcaacacatctaatgcttcttgaataatggattcactttctaaatcaagtgcacttgttgcttcatccaggataagaattggtggattatttaaaaatattctagcaatcgataatctttgtttttgaccacctgataatttaacacctcgttcacctacttcagtgtcatatccctgtggcaagttcataataaagtcatgtgcattagccattttcgccgcttcaactacttcttcatctgttgctgttggacgaccaagtaaaatattttccttaactgtatcagagaataaaatattatcctgttgcaccaatcctatttgatttcttaaacttcccgttaaaaaatctttaatgttgtgaccatctattaaaatttgcccagaagttacatcgtaaaatctcggtattaagttaattaatgttgatttaccaccaccactcatacctacgaaagcaactgtttctcctttttcaatactcaaattaatatcttttaaaattggagcttcgttatcgttatattgaaaactaacatgatcaatatcaatacgaccttgtttaatttcaataggttgagcaccaacaccatttttaatgtcataatcttcgtcaattaattggaatacacggtccattgaagcaaaactttgcgttaaagttgtaaatgatgcgactaaacgacgtaaaggcccgaacaataactccaagtatccaacaaatgctgcaagtgtacctactgtgattgatccagaaatagcaagatatgcaccaacaccgatgacaattattggtccaatatctgtaactgtattaattgcggcaaaggagtaggcattccatcttgtatgtttcaacgcacgtgttaagaaattagtgttctttttatcaaagtttttcgcttcattgtcttcaatcgcaaaacttttaacgactgaaataccttgaacacgttcatgcaagaatccttgaacctcagctaatgcttgagatctttcacgcgtcaattttcttaatcttccaaagaaaacgtacaccgttaaaatgtaaaatgggaagataaacagtgctgctaaagtcaatttcacatctaaaaagaacattatggatagtgcaataataattgttatacaatctaaccaaatattcattaacccggttaaaatgaaatcttttgtttgttcaacatcattaatcactctagatattacttgacctacttgattattagcataaaatctcgcacttagagcttgtaaatggttatataactttttacgtatatcatacaatattttattacttgtccattgcgccaaatattgacgtataaattcaattggtggtctcactattacaaaaataaataatgcgataccaattgcaatagttaaatgatgaactttttcatcagtcgttagtgcgtggttattaatcacgccatctattgcatatttaattaaaagtggtataagcattggtataccaaacttaattatcccaacaataatcgttgcaaaaatacgatatttgtatggcttaacaaattgcaaatatcgtttaatcatacaatccccccctaatctattgccctatcctattcataagcataaaaatgaatagaggttggatacataatttgtagatgtaaatccttcttacaatttacatttttaaaattaagatatctcaacctctgtcatattcatgtgattaaatacgttgtcttattcgtatgttatattctattcaatttaatctatggatactgtgtccccacacgacagcaaaagttatcatacttctttacatcactaagtcaatataaatgatttaatcagtatttacactttatttgcttaatattgtctaatttttttgtaacgttctttccaaactttgataaaatctggcgcgaatgggcccttcttctgttctatccattgttgaagaatgtccacgttgcgtcttaaaataatatcaatatcatgcggataattcatttgattcatatgttgctcatattcatcttcatctaataaatgatactttccgtttggatatactttaatatctaaatcatagtctatatattttaatgcctcttcatcacaaacaaatggtgatgacaaattgcaatagtaataaattccatcttctctaaacatgcagataacattaaaccaatattctgagtgaaagtaaacaattgccggttcacgtgttatccaagttcttccgtcactttcagttactaacgtatgatcattgccaccaatgacaacatgatcagtaccctttaatattgttgtttcagaccaaacgcgatgaatcttaccatcatgtttataactctgaattttaatgttttccccttctttaggtatggattctctgaccatactccacaccaccttctgttaatttaaccattataaattatagcatatttcagaaatagtattatataaatacatatttttacgaaataagattttactacttaatgattaaactcggtaatattgctaagtactacaacagagatttacatgtcccatttaaagtatataaaatcatcacttttatatatcaacactttaactttttgacattgttattctatgagatttaaagatatcatttatacatttttaaaattaatgtcactatattttccgataatcttattaatcatcgaatgttacccatttataaattgataaatctttgacataggtacagggaatgtatattgatctcgatcacttaaatcaaaccaaatcatgtcatctggtaatgtttcaatgttaattgttcctgaaacggcgtatacctttatcttccatgttaaatgagtaaattgatgcttcaactcaaaaataggtgtttctactggttgaatgtcatgaccgattttttcagtcatttcacgtctagcatgctcactttcaaacataggaaattgccacataccatgcaataatttttcgctacgcttttgcaacagatattgaccttgattatttctaattaaaaagacggattgctcaattacttttttacttacatttttagatttaacaggtaacttttcaaatgtacctttatcaaatgccacacagttttcttgaactggacaaaataagcataatggatttttcggtgtacaaattaatgcccctaattccatcatagcttgattaaacgttccagattctgtagtaacatacggtaataattcttgttcgtacgatttcctcgtcgattgtaatttaatatctcgatagtcatcattcaatctagaccatactcgaaaaacatttccgtctacagttgctagtggtacattatatgcaatgctcattactgcagcttgtgtgtatgggccaacaccttttaacgctataaattgatcaggatctttgggaactaaaccttcatatttatcatgaacttctttaatagccgtatgaaaatttcgagctctactataatatcctaagccttcccagtactttaacacttcatcttccgaagcttgactcaaaacttccacagttggaaatcgttcaacaaaacgatgataatagtcaataactgttttaacttgtgtctgttgtaacatgacttcacttaaccaaatatagtacggattggtcgtttgtcgccatggcatttctctttgattttcatcaaaccagtgtatcaaattttctttaaaactagactgctgatacatttataaaaccctttcctcaccaaaattaattgtctttactcataatgtttttattgtacattaaaatcatggttagtatgtaagttaatttagttatttgcgaaattggattataatagtatatataatattatgaaatgagtgaactgatatggacactgcaacacatatcgcaattggggtgggccttacagcacttgcaacccaagatccagcaatggcttctacgtttggtgcaacagctacaacccttatcgttggttcattaattcctgatggggatactgttcttaaattaaaggacaatgcaacatatatttcgcatcatagaggtatcacgcattccatccctttcacaatactatggccaattttaattacatttttaatattcacgttctttagtggaaccaacccatttcatgtatggatgtgggctcagctcgcagtatttttacatgtctttgtagatatattcaattcttatggtacacaagcacttagacctatcacaaacaaatggattcaattaagtgtgattaacacatttgaccctattattttcacagttctttgtattggtattgtattatgggttataggcttgcatccatttgcagtcttctttcctataatcgctttactaatcatttattacatgattcgttttaaaatgagagccgtaattaagcaacaagctttaaaagcaattcaacaagagcatcaccctgttaaagtatttgttgcgccaacaataaaatttatggaatggcgtgtcgcgatacaaactgatgcacatgactatgttggaaaagcatatggtaggaatgtggtgtttagtgataaagtggaacgtcaaacattatcaacagactccattttatggaaagtcaaaggtaataaagatatacgtacttttttaaacttttcatcaatctatcgttggcaaacaacaacgttagcagatggttctactgaaattcgtttgattgatttgcgttatttaaaaaatgatcattattcatttgtggcaattgcacatgtaacaaacgataatgtcatagaccactcttatattggctgggtatttacagaagataagttacaacgtaaactgtatgctaaataatttcaagttattattcactaaagttaatctataaaaaatgaacaaccgggcagaatgaaaatcaaaacgatttttactctgtccggttttttaatgtaaaactataaatgcttttacaaaacctaaaatttatattgttgctaacaaactacctttaatgactcgaaatatcaaaatcagtataggaaaacaatatctagattatattctaattgtttctgattcttacagattaatttacacaacaggttagctaaacatcatgaagaagtatccgcctcgtctgtactatcatttgaaacatcttgttgattatcagtttgtgtcactttagatgttttattataaattgcgtgtgtcgtataccttgctaatacgaaatttactgcagctattaaacataagaataaaataaagtaaaaatgatatggaatgttttccatacttgatataccaaatatgatagactgtgctataccattaacaatgtaatacattggatttagcattaggatgtgattgataaatacatgatttggatttggtatgaaaataattggtaacaataagaaacacaatacacaaatcccataaaatatgatatttattttttcagttaacagtcgaataagaccaaaagtaactgatattaatcctacaaaaatagttgccatcacaataaaatagaatagcgctatatacgatgtttcgaagtttactggtttaaccaatgcactaatcatcgtcaaaatgactagcataataaaacttaaaatagacataataactactggcgtcgctgcggaaatattaaataacttagtaactaaaaagtcattcatataatgatgataagagatataaattgtgaacatcaataccacaaaaacaatcaatgcaataattctaaataaccatcgcacctctttaacatcggtcaaatgactaaaggaaaatagcgtttcatttgcaataataagtattaaacatgcagctaatacgattagaaaacttttccaactttgttttaaacgttctgttacataccttttagtatgcggtaagtttttaaaatataaaataatattatctagcatctttacacctacaattcaatataaatccatttgtcttctttcaaattggcaatacaatatccattaccaactttagtaatccaaatgttattgttaatattaaacttatcttttaattcttttttatctacaattggataaacaaaaccgtataactgattattatcattgaaaagtaattgtatcggttgttgtgtaacggatgcaacgaaacggttatcatcatcaggaactaaagttttaataactgaactatgctttttatgtaattgactgttaaagtatgcatagtaattactataatttgatttcatatatggcgctaattttttaaaactatgcgtttgatataaacctgccgggttaaaatattctaatttatctttactaacatagtaagtcttattatcggcggtaacacgataatttttactattttcgccagtaattgtaactacactatattttggaattgtgacttgtttatccccttgcatatccacactgccattaaaagcaattccataagctaacttttcgccatatggatctttattttcattttgcatcgtagcacgattcgtaaaatctgttatcgaaataattccaatattattgaaaatgagcaacatcatcaatgctaagcctaaaatagtacctgaggctaaagtccaaaaacgcactaaaaacttaggcggttttgcatgattatagcgctcaacgcgtttgaaattataggtcatctccggtattcttgtacgattctttttccaatctaaatcaaagttttcaatttcttcttttgagtttagacttaatcgatcacgttcatgttctttaaaagatggaataacttgtttaagtgacccttccattcttaattgaccatgtgaaaaccaagctatatagttactcacttgtgaaattttatcaatatcatcaccaattgacacaatcgttaaattattttcaatataatcatttgttaattcaatcgcacgttccataaattgtggtgttaaatagtcaataacatgatttaaaataataatatttgattttgatgagcgtgcaatacttaatagtaattgagcgtatgccgctttcgaaatatggttaaccggcttcgttttataatcgcctaaatgtgcatattgaataatctgttcagctttatgatcattaatttcatatggaaatagttgaactaactgcgctgtgtaagcttcaacagtttgatgaattaacgattgatcttcaatatatccgtagaacaaatcttcagtacaaactactttacctttatcaggtttaattgcacctgccaacaattgacctaccaacgctttggaagattcaggttcaccaattatacctaatgcttctccttgataaatatgtaaactaatattgtttaaatcgatatcttcagcatcatatccaaaaggtaaataccatttcttattctgtttattcctatagtagtgtgttacttttagtaactttaaaacaattgaacttcccatctattttcatccttctataattgtaataacgctataggtaagccttcttcgggttcatcgctattaaatctaaacccccacgcaaaaataccttttaatctttctactttaaaatattgattactgccatcagtcagtttataaattttaccaatttctatcttttttctgtctactaagtaactttcggcaacaattactttactttgataaacgtcatattcatttaaaataccattcatctcagcttttctcattttctctttataaagttgtatttcgtgtcttaattctggctcagacatttcactcaatttcttctgttccatcggcaataccactttcttctaatttagctttaattttatcatatttatatccttttctcataaggccttcgatagtttttgaaattaatttctgttgtgtgtacttctttcgatttttattataaattttttctaaatctcgttgtaataaatcgtctaaaaccgcttcatcttgtgtaaaatccatttcatacaatacagcatgaatggtttccatttcaaaccctttttgaattaaagattgcattactttttctttaaccttattttgtggccctttttttgttttagatattttttcagcaatttggataatatcatcaagttcctgttgttctctataaagttctgtaaacatttcaatgatatttggttctataccaagttgatatagtttttgttgataaattttaggtcctttatctgtcgtgcgaatcattgtattttttaaactttccgcataatcttgatggtcgattaacttttcgcgataacaatattcaatcacttcagaaatcgcttgctctgatatctcttctttttgtaaatattgtataacttctttttcagttctctttttatatgataaatattggattgctttatttaaacctatgcgataatgatcatacttttgaatctctgccatatcagcagcttcaagttgttgccctttttttaaattaaatttgactaatgtatcgatatctatacccatttcaaattgttcatctaaaaaaagattaaaacgttctttgtttttcttttgaacttctattttagtaatcttcggcactggatcaccccgttactttctcaagttttaatacaatactcttttattattcaataagccacttcctatagcaaatgtttaactttaaatatttttcgatgctaacaaaaaatcacactatcatcttttaaaatgaaagtgtgattacaagcaaatctgtaaaatttattaagcagaaacaattcaactttatcattatgacatttcaattaaaccttctacattattgttccaagtatcttacacatgaatgcaagtatttaacgatttaattgtgacatagcctgttgatattgtgtttcattgatataattttgttgcttcattttttctaagttcgtgcttacacgttgcgtaaaattctcagacatattattgatattatatacgctaggtgcattgactttactagctaaaatagcgctttgtaaaactgtaatgtgagacattgttgtactatttttattcacggttgttccaaagtaatggtttgctgcgccctcaagcgtatattgattatccccaaagtaaatattatttaaataaaagcttaaaatttcgttcttattatattgtttttcaactcgatgagctacaaataattcttttacttttctagtaaatgaacgatcattatcataaaaataatttttgacaacttgttgtgtaatggtactaccaccttgcacatctctgtcgctaatcgttgaaaataaagctctagttgtacctttcaaatcaaatccatgatgattgtagaatcgttcatcttccattgaaataaaggcacctttaacatactctggcatgttatcagctgacacaaaactacttttattttctatttttcttagttcatccacattatcgcgtgtagataaaaaatacatgataccaataaacaatgcgataatgattagaatggttaataatattttcaatagtattcgtttactttttttctttttcggcggtttgccaactggttgataatacgtattatagtgaggttcgtgtttcatatgctcaaaatgttcatttgagtttgagtacctatcgcttcttttcatgcgtttgctccttcttttaaaactcacttagtatataccttgagtttaccagtactatcacaaataggctacactttttgggaaaatcagtccaagggcttacaatcgtatacgccatcatacttacttttttgttttttgaaaagattatagataaatcattgcgattttaaatattaatcatgtcaaatattgttatattttataaaaataaaagaccatccctattaaattgaaatgctcccttcaaagtagacattgaaaaaatgaaaactttgaagggagctttatttatgtcaataaaacctaaagtagacatagatgtactgctatatatgtttcaagaatatgaaaaaggcgtgtcgtttcaatacttaatcgatacattacaattagatattaatgtcaatactttgtatcctaagtataaatattataaaacccatggtattgaaacactacttacacaaaaacaatacaatcactattcaaaggaactaaaattaaaagttgtaaatgaatatttgaattcaaatcaatcaacccaagatctcgcaatcaaatacaatattcgtagttcgacacaagtcaaaaattggataaaaatgtatactgtaggaaaagagattaagagtcaatctccgaaaactggggtgtatatcatgaaagcaagaaaaaccacatttgaagaacgtgtcacaattgttgaatattacttgaatcataaacaatcttatagagaagttgcagaacactttaatatctcatacggtcaaatttaccagtgggttcaaaagtatcaagcacatggtaaaaatggattagtagatggcagaggcaaaggaaaaccgaaatctattatgacgccagaagaacaaaaggaagctgaaattcaagcattaaaagcacaaaatcgattattagagatggaaaatgacgttttaaaaaagtttcaagcattggaaagagagatgattcaaagagaaaacaaatcacggcatacaaaacgattgaagcgttaaaacatcaataccctatccaacgcttgtgtcgtattttaggcatttctagagcgagttattataagtgggtacattatcaatcgagtgaacttgaattagagaatgaacaacttaagcgagaaatagaatcaatctatcataagtataacggtatttatggctatcgtcgcatttatatctatattcgattaaaactaggtaaacaagtaaaccgaaagcgaatttatcgtttgatgaaagaacttaatttaaaagcggtaatacgtcaaaagcgaaaaccttatcgccgttcaacgccacaaatcacatcagaaaataagcttaatcgacaatttgacattgatacgccaaataaagtttggttaacagatgtaacagaatttaaaatcaaagaaggtagtaagatatatttgagtgccatttatgacttaggtgttaaacgtattgttagttatgagctaggcccttctaacaataatcaattagtatttaaaacattcaatcaagcgatagaaaaagtagaaaataccaaaggtattttatttcatagtgaccgaggttttcaatatacatcgaaaacatttaaacatatgttggatgaatgtgacatgattcaaagtatgtcacgtgttagcaaatgtatcgataacggtccaatggaaggtgtatggggtacaataaaaagtgaaatttttagaggaaataagcactttaaatttaatagtgtagaagaagctacaaaaacaattcatgattttattcttttctttaatcatgaaagaattacattaaaaatggctgattctgtataacaacaaaaccaaccattaattttaattatttaattgtctactagactgggtgcagttcaaatgccaatagagacgaccttttatttgttattcattttttaaaactaaaatccacatttcatttcaaacgaaaatatataaattttaacaattgataaccgcaatactctattgtaattgcttaacgatttctcgattaaaatcatctaaatcgtctggtactcgacttgttacaatattgttgtctacaactactgactcatcaactacatgtgcgcctgcatttgataaatctttgcgtacatttaatactgctgttaacgtacgaccttttaaatcgtctgtatctattagtatttgtggcccatgacaaatggcaaatgttggtacatcatttttagtaaagtatttagcaaatgtgccatatcgaccttctgtatctccacgtaaatgatctggtgaaaatcctccaggaattaataatgcatcataatcttctggtttagcttctgcaatacctacatcgacagtaactttttcaccgtgtttaccaacaacttcactatttgcagtatctccaatcactacagtattaaagccagcattctctaatgcctctttaggacttgaatattctatatcttcaaattcgtttgctagaataattgctacttttttagtcattgaaaatcacctttctatatatcattgatacaaatactatagacaagtaaatcaatgattaaacatacaagatataaaaatattaagcgactgtcgcgatatctaactctaacacatcttatgtggcatttacttagatactaatttaaccttttcttcaagctgatctaacaatccaatccattcatctatatcttcaacacgtacttcatcaggatttacatgatcgatatcctcaataaacttatttaaacgcgcttttatctgttcgattgtttgctgttcattcataaaaagttaactccttttattttgttttctttttcattattatcctaacagaaattgcgttaaagcgatataatcttagctatatttatgacattcaaattattttgacttttaaaaatccccttttcaattaactaaaattaagagataatttgttacgagtgataataccaagtggtatcataccgatatgaaccaaatagaaagaaggaagtttaagacgatgaatagcgtcaaattgaagcaacctgttagcattcacaatgacccatgggaagtgaaatttatatacatttaaatttcatgagacaataaacgttgatttaatgcgtttttcgccttttttattttccttattttttctgttttacaacaaaatggtatcaaaaatggtatcatttgtagttattttagcttcacatattaaaacaaccacactcctaaattaataggtggtgtggttttgttggttgtaggggattaaaaataacgcatcagttaagatgcgattaaaataaatcagttgcaaatgcatcaaagatagatttaatctcattaaaaagtcgattgttcgtttcatttaaatcactaatgtaatttctgtgaacattcttgctatatacagtactaaccttatgacacctaacaaatgatggaacgttattcaaatttaacaaattacaagtctcatcgtttacttcaaaatcatatatagaatgtcttttgctttcatcacttattttcgaaataggcaaataagtgaaatcacaagggaattgattcttttcgcaacctattattaaaccaggcctagatttaaaagcaacttttgcgcttttcacatcataataaggtaatcttattttaacgattttacctatatagtcatgaggggatctagtgtgcactaataaattcctcctcatctaaatcttcaaattcatctatatacatatcgtaactataatcatataatcttattttgtttgcatcttctttgatatcctcaattgtgagatttctataccctcgttcattagcacttaagcctttacggctattaagccacgaaatttcttcgtgtgatttctctctaagagcccatgttgcatatttaccatattgataaatagcattctcgattataaattcttcagtatcattaactttatttctagaagtattatcttccacaaagtaatcaaataaccctcttaaggacggtaaaactggaccatgtacccaaccttcaaattgttcatcgattatagcgttccctgttaaagcaatagaagttttctggatatagtacattaatttatgcactttcatctcgtcgcccactatgctgtttcctgtaatttcttgatattttgtaatcaagttttgagctataacgtatgtgttattaggttgccattccatactaaccactcctttcattttttataaaataacctttactttactcataaaattttgtaattcttctgttgtttttaaacgttgagcaaaaacattaggtctattgacttgggcatcttcacttttattcatggcattcactaatttttcagctgcttcgttattaaatttataatctgtagtaaaactttttgtagccatactactcacttcctcgttttcatcatttgtctatcgggtataccttgtctacctgtttaaaatgtatcatgaaagtatatttccgacaacagattcgataaaatttctttagtatctctgattttactcttaaattaatttgttcctaataacataaaaaaacaaccacccatacattgagtagtgtagcgactgtaatatttctatgttgttgagatgtatgtatcaagtgacgggcaaaaagggtatcaattgccgggataagtgttaagttaccaggccacttaacaggctatatagttcactcctactatatacaagtaattataacataaaaaataggcaagcaccgaagtacctgcctgctactcacaatttcaacttgagagagagatgttgaataaagtatatagaaataataccacagttattttttaatgcaaataaaaaggcgaatgcatataatgcacccgcctagaaaaggctcaccacaattttatattaactgatttctacccataagtcacctaatatctgagtaattagatttcttttcgaatcatagcctattataaaatccacggtatctaggaagtagtttattcgctagattgcgaagctactaatttaaccgtgtgtttttcccaatcaatttcataaattgatgtgtgtgttgctctcttttgattcttaatattataacctatccagtgcaagttgttccaaaaattttcataccgatccatttctctttgataagtcactttaattttagattttttaacatccttttgtttgtgagaaagtacgcttataaattctggattgaaattaccacgtgctaatatgggcatttgatgtgttggtaagaaattttgattagcattcgagctactctgtctgccacctaaaaatagttcgtttccatataatgaatcactactatctctgccatatggtccccaaccattattcatgattttatgtgcctcgacaccccagccgattgatttatgatttgttttcctatcaatcgtagttctgtagctttcttgcttataattaatcgtttctgaaaatgattttgacccattcaatccaccagttaatccatttattatattaatatctccgccatatgaataacctaatgtttgttgaacttgaaattcttcattttgatttttaggcgcgtagtcaacaatatttacagaatctttggactccgagctaacaaaaacattatacttagctccccaataaaattgtgaatttatactactatcagaagtgggttgggtatagcctgagtaaatgtttccggcagcttttagtattaatgtgtctttatcataacttttgtctttaataaaattaaaagttagaatttgagaaatttttaatttgtcagaatctgatgtagcagtcgttttgtacaaagtgattttgtcatccacttttttctcgctgacaggtgtgatatgttgagctgcatcaactgtatttgatagcatgattaatgtaattgatgtagcgactgatgatttgactatattcttaaatttcatattagttgtgcccctttactttaatttcgtacgttttccaattcacttcatatttgaccacaaagtttctgtttacaaattcattatgttttctttctggataaagaccaagtttaggaaggtaggttgcataggtaacatccatatttctaccgtaagtaatttcaaattcgctcgtatcgcctgaatctttttcgtgagatactgtcgcgataaaagacggattaaatccacttgttattaaagggggcaattcattatcgtctacaaaatagtctctagcattaggtcctcttgtcgtatttcttataaacaataattcatcgtaagcagaccatcgatgccctgctataacaaaagaatttgctttaaccccccacttaatagtttttgagctttgttgttcaacttcgctgacataactcttttgggaatatttaatactcttagaataattaaatgatccatttccgcctatagatggtgctgactggaatttacctccaatgttatatcctaaagtttgaccaacatcaactgtttctattttatttttaggaagataattgattaagctcgtattttggtcttttgatgtaagaccgatattatattgaaatggccaaaccattcttttatttgctctattttgtttaacatcattgaaagttgtcctagaattgataaaaccttgcatcttaataattaatgcgtctttgttatattttttatcttttacgaaatcaaattggacattttgtgttacaccccatttcctactacttacatcttccgtacgtttaatcacttctgcatcgtcgccaatatcttctgcattagtagtagccttagagccttgaaatggtgtagctatagggacaattagacctagcgacaaagttgtaactaataattttctcttaaacatagtttcactttctttctctttatatttttaatacaaatttatactattacataattcataattatataattaaaaatttattaaaaattcaataaggttaataaatccctaaaatagtattgttacacccaaaaaacattcaaacacgatcaataattaaaaaagttcattatagttgtatagaaatatacctgaaaaacattgtatttttaatgcttgttaattttttaactataaagcctatacgaatattaaattcaatatacattaaaatatttgatttttctgttaaacaagaaaattacataaaattaactatttattatctttttattaactgcgcgttttcaataaacttctttcacaatcaatctttcatgccatacccactcattatggttgttccagtaaatacggcaccaaccatctataatttcaaacacatatattaatgttccaggcgcatatatagcctgtccaacatcgaatctatagttagtacgattatcaccgtatctagtggctgaagtagcacctaagccgtcgattttcgcattaaaataagcaccttttgaccatttaaggttataaggcgctttacttccaactgttattttacttgcagatttaccgactgctttttgagcaggtggtttaactttatttgtgatcttattcattaagccctcacttttatacttaggtctaataaagtgagtacagccgtaataattatcccaacgtaactttgcaggcgtatttgcgttaccgtcatagttctgttccaaaattaaaaattgatttgtattaccaccattaaacactaaaccaatatgaccgtattgtttatatattcctttggtaaatacagccacatcacctatttgtggaacaaacgatggtgtgttttcatatactgttgccatgtttttaaaatcgttattgattgcatcttttgcatttccccacattctaatttctaacaaccaataaatgtaatcaactgctaaatctgcacattggtaaccataccaaccgtcaaaatcaatatacctaccttgataccaacgtaaccttgctcttgcttcactgtatgttttcattattttacctcctagtattttctacttggttcttcatattctaaagcttggtggctatcacctatacctttagtagtcgggtcttgaatcacaccagttaatactaaaaaccctaatatagcgtttaaaccgtctgttaattgctctgtataaacttgaatatcatacccaatagcttttgcgatgttttgagcaaataaaaagatagctgacaatatcgctacccaaaatgatttttgtttcattctaattttccaattaatcatattcttatctccttttatccaaaataaaaagacgactaataagccgtctatttgatatttatattatggtgtgttaatttatatatagaaaaaggcaacatgcgcaaacatgttaccttaatgagcccgttaaaaagacggtggctcagttttgaaattattataaaataaccattaaccgtccaaagttgtgatggttattttttatggtttaatttaacgattgcgatgactaaaccaagtaaagcaacgataaacataccgaaactaaacattaaatttagtgcatcaacaacagataccacaaaggcgtctcctttctaaagatttcagtaatgccaccataggcaccacctccttatactcagatagccaccatctatccaacttgctcacttttgtatattaccataatcacaacaataataaaaagccagtgtcaaagcactgacctttaaaaattacttacatttaccaaaccaaaaacacgtccagaaactgtaacctaaaattcctttaagcatagtaaacacctctcttatatacccataagcatacgtaataatgctataattagcgacccaaatattgtcccaactaaaccaagcacccacattttcatatcacgaatattcttatcattttctttcttattcttttcatctatttctctttctttttgaatagcatctaaggttttatctaatttaatgttaacttgctcttgggttttttgacctaatttaatttcattgagtgtgctgagcattgttttatcattctcttctaaccttctgatgcgccattcatgttcgtgttttttgaaccaccccaattcagtacacccgctttctaaaagaataaagactatgagtatctaactcatagcttttcatactatttcagtgttaactgttacctctggagataaatctgatctttcaactacttctttaactactttcacacgttgttttttgttagttaattgatataacaaatttaacgtctccgcaattttcttagcgttttcttcagatttaaaatcttgagcatggttaaccatttcagaagttgtaaaacttcctgtgaaatcttgatatactacacgttctgtaccttctttgtcgatttgtactaaaataaacctttctgtattgttgataatttcttttgccatacttgaatgacctccttaaatttttgtataaaaatagtgctaaggattactcttcctcagcacattgttgattttctttattttcttgtatatacgcttttaatattgcgttttcttgtgttaacctcataatttcctgtgataaataatgaattgtatattcaggattagcttgtaatccttgtttgttatcctgcattctttgactcctccaatttcttgattcttagttgttgttctttgataacagggataagatgaatccatagacgatcatacgctataccttcaatttctcctttgtcatcatacgtgacaaactcttttaatcctaaattctccacctcttcagcaatcaaacctacgtatctatccagtttataggtgtcttctgataattttctatcctctctcagctctctagctaaaatttcagactcagctttatcaaaccacgttctaataggtaagttaagaatagcttttgaatgttccagttgttcatctctatcgttatattgattttcgatagataacttgtatttacgcgctgatgtcgaacgcccaattgtgccagcagaagtgatatgcaaattagctgcggccgaataagtacgtctataaattgagttagaagctatcctatctcctgcatcatctgaacctacagacagtaggtctgtactctgtatatgaatatacctattaccatcacgtcgcttcagcatattaaatttgccataccctgcttcgattgttgtatctccacctgttgcatatcgtccattaacaatttgaacaagacctttatttctttctttagaaaacctgataccagcaccgtaatcatagttctcatcagaaccaaacataatataaccgtcactcgaataagcattatctgcattagacagcgtgaatgcaaatcggtttaatccaggaactttgtctgtgtttggatataaatacaccggtgcctgtttgcttttgatattcgatgaagcgtaagactccagaacaacccgattattatctgacgttagtgcaacgacaccaccataggaattgattgttataccattcatgccactatcactgtaagttttatcccaccattgaatcgtaccagatgaaccaccgtcttcaccttcaccatcaatataagtcgaaataccaaaatgtgacatataaagtgaaccgccagcggtgttatttctaaatcttaggtgaccgtctttcagtcgcgtaaaaatatcgtctgttgaacgtttccctctccaagtacgttgcacaataccacctagttcaatagaatcattctgtatttgaacatatctgttattgtcaccgcctttaattccaattctattaacattgatatcaagaccctctcttgataaattaagactgttgacaatatcggttttatctactttatctcgcatattttggataagaagatttatttctctattaccgctaatatcaattttatcagcatttaatctaattccctgtggtcctatatttaaagcttgagccaccccattatcatcatatctgattgttgttccatctgtaacgttttggacaatctcagctaaaatatttgaaagtgtacgattggttgcattaaactcttctttagtagttcttgatttgatttctttaccattttgtataatttgagaaccatagcgagtcaatgtttttctctgtgcatctgtgctttctttgaccttgttgtctgtataagcattagctttcttttcaacgtttctagcctttagttctgcgttttgttttgcctcttcaagtttagcttgagcgtcttgtatagcgcgttgctcttcttccgaaattttaccatcaatatacgcttgcgattctttctctttaagatcatcttgagcatcaatgtatgattttaaagcttcttgcgcttcttgatttgcttgttcaatacttgctttaatctcaggattattggacaaatcacttaactggtcgtcagtatattgtttttgttcttccaatccgtttcgatattcgtttaacgtaactttatctttgatttcaccttttaaagtcgttctctcagcttcagcagtatctaaacgttcaacaataccgtctttgtctgttttatagtccgatgtttttacatagtcacgtaattgttcttttgtggattctctagctgcttcaatagctgatttaacaacattaggttctccaactaactgcaaatcttcattcaccgttaaaccaaattttgttgctattattcccaacgcttctttatatttttcgtcagtgtattgtgactgtaataatttaaatctatctgaaatggcgattttgacatcttctacatctgtataaacatcttgtaatttctttctatactcaagaaataaagcttgtgtatctaccaaccgaccaatcgttgcagtttcgggtgtcatagattctaaattatttttaatttgattataaacatcaatcacagcgtctaaacttgcttgtaagtccgctttcaaatcattatctactaagtactcgctattcagtaattctgtagcttctgacaaaagactagcgtgttgtatagataaattaataaaaatattgtttaattcactgaatagcgctttctctcttgttataccacctaatttttcaacatcatttggtgttgcttcaatccatcgaccattccaatatctacgcaagacagcaacatcagggttacttgtatcataccaaagcatatcattgactggattttctggcggtgtatcacttttgtgtattttgcgttcaaagtattctaattcaccatctacaacatctttaactatagtgttgatattgctaatattatcgtttaacttttgatgtattatgttcaatcgtttgttaaactcttctcgtaattctgattctttgaactctttaggttgaccgaatgtatatgtgctattttctgaaattatgttatattcttcggcaataacttctgcctctatatacaatggcgggttaaaatctctgtgtttcaccctgactgtatctccgattgagataatctcatgcggatacgtagcttctaaatcagtagaggtaatctcatatgacatgactgctgacttgcgtttatttaactccgttttggctaaagaacgtaatcgtgtttcattcatattttgatcgtctgattgtggttcatatatcccccaaatatagcgcataggtaagttgaattgactttgcgcttcgtcatctgtcacaactagctctaaacgcttccctttgtcattttcaggtcccacagcaattaatgctgttttgatttctgacatatcaatctttctagttagcccaactaaatctttaccatattcaatttctttacctttgaataagctgtttttctttttgagtactacatatcgacctttaacagtattagaactaagctcaatataaaaatccaataccattttataggttgtacataattgctttaaaacttcatatctcgtttgataagaagtccatgacgtagtacgtaagccatcgtattcggtttgttcagaaacttcccaacctgtatcgctcaacacatctttcaatgcttctgaagttgtctttttctcaaatttgcctggtgcatacggtttagctgttgttatatcagcaagataagacgctatacattctatctctgtgtagccgtccatcgtatcttgaacccagttaataataaattcacgccattgtttgtttgaatcccttataataacacgatgtcgttcacgaaacttttcagctctttctgatgatatgagtagttcaagcatttctgaattgtcattaacattacgtttatgaatcgctctaactaaggaagggtcatcagtagaaaggaaatctataatcttgtcgttaaaatctaaaacatgtatcacactctcatctcctttctataaatatctatcttgccatttaacagtcgtatcaaagacgttttcgggttgtatgattaattcactgtacccagaatcaacattgaaataattacttccaaacgatttctcgctcaacattggttcctcattgatgacaacactttttgcttgcatatctatttttactaaatcacctttttgtataatgacatcccttgcgcctttcggtttcggtagaatctccgtattgaatgaacctaatccattcatctccatccacttataaccattatacttcgcactatagatagctatgatagaagctggacgctgataaaacttaccgccatctatccactctttctcatccatatcaataggtttacgtctatctgggtctttaatgtgatcaaatttccaagttttaatagaaaatttattacctactcttctgagtctcatgtatacaacaattctgtctttgttatacattaccggcttattctgatagtcatatatctttttcgggtctcctttttggttatacaacgtaacaacaatgtgccctatttttctatcatggtatttgttttcatatccaatagaagcaagcaacttaccgtcactgtcgtatatatgttgagctgttcttccggcacctttacctttttgttcaacaatacatttataggtaatttgaaaatctgtcatcgctttagggagccctcgtttcgtgccagcaccaacccaaccttttgcatcaggaaaattagttgctttatatccttcgccaagattggatatcacaaagtcaccgccgaccttaccacctaagtcattacttggaatatcttcagtaatcatcttagtccaacctttgaaatcacgaaactcactatgataaacaggaggcatgtaatccttaacttctttggttacttcatcatcaccaaccataaaataatcttcatcatttttagtgatcataaagtaactagatggtttaattgctcgggcttcaacaattaaaggagtgtcagcagtcccactatttacaactgaaacttggtcagaaatcgcggtgtttttgtttccagttaccgagtatttataagggtctgtcaacactacttttatagtgaacttcactgaacctcttgggtttttcggtaattttaatggaccatcaaaatatgcaaaccaataccagttttgagatttgaatttaagttttttaggtgttaaatctttaatattgaagaacttgaccaatgcttctaatatatcatcgtgtgttttttctccacctggtgacaatttttcgtttcgaataattaatggtaaatcaaattcgatatcatttaaataacgattcttagcaatagaacctgctctacctttcacactttctttttcagtaacaaaattaaaagagggtatctcaaaccctctttgtacaactaaccattcaatggttttattgtctatttgaattgtgtcttgcattagattatcgtgcctcctcttctaaatctaactcttgtagattcgtgacgctctcgtttatcgatagaattatttacctcatcttcaaacacatacttattaataactggttcataattcttatctgcaataacttgattagactcaaccaaactaaccaaacaattaataaccgcatccagcttattctccaaggtatgaatatagtttgtatcactattatttatacttggatttggtaaattgtttggtcgcttatttttagaacggttatcaatatcgttagcagctaaagctaataatttgtgtgcttcgttcgctctacttggatcagtaggtattatccactctggatatccttcttctcctaagtggtacaatccgttgtagactttgccaccagtagcatatgcgtaatcaccagcgcgtttgaacgcagctctccatgagcctgttcttggtacccatttacccacaatatatctcatagccgatatagcttgatgagttgggttgagaggattattgtaacccgactttgcgtacgctctaaatgaaggatctatcatttggaacatacctcttgaaggtataccagctcttgcgttgctatcccaattattgactgcattagctgtataattggattcacgactcgcaacacgcatcatctcgttagtaatccaactcgccttataccttcctcctaaaatattttgagcagccttaatagctcgtctagcattagctgcaccattaccaccgggtgcacttttgccgcccccattattctttcttaaccacggtaacgggtctctatgtcttccattccaacgcatctcataatgtaagtgaggtcctgtactaaaccccgtattccccgatataccaacagtctggccgaccctaacttgttgaccagttttaactttatatttagataaatgtgcataaataacttctaaggcgccctttacaatttttacccattttccataaccaccattatgaaaaggcataacttgtgctctaccattaatggttgatggaacaggttcgtaaatgtaatcaaaatccagaccttcatggaatgggcgtccggtttctcgtgtataagcagcagtgtgaccgtataaataacgtaatttactcatatctaatacaccgccatcacccgactctgcgaaagcatcctcaagccacttgattgcacttttcttaatcttagaccatgcagcttttgttatatcgccagcaatacccatacctttagttagagaactgaaatcaactccaaacgcttgaagtacataatttaaaagtttgcctggattatcgataaagtccatgacatcaccaactttatcgccaagccactttgtacctttacctatttgatcttttgtccagttaaatgccgatgatgcccggatttaatgtctttccacatagtacctatgctaaatcttggaagtgttccatttaacattgaataagtttgtgcgccgttatatacttttgaacctttaggtaagtacgctgttgtatctgtattaggcgtaagtacccgtttgccattagggaattcaatcatttcatttctgaaaccattcggaccatttccacgtcctttatccccaaccgtagcgaacgtatcccgcgcaatcttaccgttcttaactaatcttgtagtagtatgcgtatgttcagtaccagtgtgtaacttcggtattttgtccatacccaacttaccaccgacccagtttaaaccttcaattaatttattaagacctcttttaacagcgtctaccataccgccgatatgatctttaattttaccaatgatagattttaaaccgtcacgcatgcttccaaagatgttacgcactctattccataagcgaccagctatacctaccgtgttatctttaatagagttccagatgtttgacatccaatttcttaatttagtaaatacatctttcgtcgcattccataaacttgtgaatttagaccttacacctgtaaataacgaatgagccttgccgacggtattgcttttgatattattccacgtactagataaccagtttttcatattagtgaaaatagatttaacactattgaataaaaaaccaaaaatacttttcgtcgcattccaaattgccgataaagattttgtaaagatgcctttgataacactccagataccggatattaaacctttaagtaatccaccaaagtatctcactacacctagaattttacctacaaaccacagttgtattaaattccaaattaactgcacagtacctttcagtatcattacaatgccgtcccaaacgcctcgccagtttcctgtgaaaagactagagaatactttgataatacccaaaataatattaatagccccttgtattacacctttgatattttcccaagtgctgacaatcaaagctttaaccgccggccaaataaattgcatcacttgccaaatcgcaaacataattggtttaataataaagttaaaaataaattcaaaggttgctttaatgaaaccagctatattttgcaaagcttgtgttatttctgagccgttctctttccagaaagaggctaattgagcgcctatctctttggcgaaaccaacgattgcatcaactactttaaagaaagttgttctaatcgtattaactacattttgtattcctgctacagtttcgggtggaaatatcttctctagggtaaccgcgcctttactatcacctttgaataaatcaaagaaaccttgtaatgctagtttagctgctttaaatgcgtttgctacaccagagattgcctgatttacaatatttctaaaagtttctgaacgtttataagcttgatagaaagctatgccaataccaactaatgcacctacaattaatgttataggtaacgttaaactggatatcgacacacctaaaaccggaaatagtttaacaagggatgcgattttagttcttaaaaacgcgaatataccaccagctttattaacgtttattaacaagggtcctaaaactgtcattgcattccccatcacgctgataaataaaccgaacataaaaactaatggacctaaaactgctgcaaacaatccaaacccaataaccgctaattgaattgacgttggtaatttagtaacccatgtcactactttgctaaaagcacttactataatctttagtgctggttctattctgtcataaatcgttaaggctagttcttctaattgcgaccttaaagttcttaattttccacctaaaccagattccattgtatcggccattcttttagatgcgccggtagatgaatctatagatttagttaacttttgatagtcttcatcagaagcatttataatcgctaatgctcctgacatcgcttctttaccaaatattgtagctgcagaactagcttgttggtcttttgaaagatgtttaaatttttccctcagttggtctaaaagctttcgcataggaatcattttcccattactatctgtaatagatattcctaagcgttccatttcattccccatagctctagttggacttgaaagattggtgaacattgttcgtaacgctgtacctgctttttcacctttgataccagcattactcattaaacctattgcaatagatgtatcttcaatcgtgtaacctaacgcacctgctacaggagcgacatatttaaaagcttctccgagccctctaacgtccgtatttgccttcgagctagtttgtgctaaaacgtccgcaaaatgaccactatcctttgcttttaaaccaaatgccgttagtccatctgtaacaatgtcacttactgctcccagttcttcgccagatgctgccgctaaatccataactccgcttaaaccttccatcatttgcttagaatcccaaccagcaagtgccatgtaatttaatgcttcagccgaatctgatgcactaaattttgttgttgcacccatttcgcgagcctttttcttcaaagcttcaaactcttccccagtagcacctgaagttgctttaacttttctcatactgtcatcgaattcaataccttttttagctgctacagcaaacccagcaaccaccggcgcagttacatacatagtcatgttacggcctacatttttcatactgttaccaatttcttgaagcttaggaccaaaattattaaagttggtcccaagttttcccattgcagtatttaatgctttctgctctctttgcatgtcttttaattcttgtgtggcttggtttaactctcgctcatattggtttaatttagcgtaagcttcattgtatttagcagccgcaacttgtgtctttgcactgttttcaccagtttctttactaagtttgtcataactatctttcagctctttagtaatctgggcttgaactttttgttttttactcaaaccttcgacttttatcttcgacttttctaatgaattatcatatctagaaaattgtgataaattagccgaaagctcacgcgaaaccattttcatttgcctatttaaacctgtcacacctctattgaatccagaaccatctaaatcaacctttatgaccatattacctataggattaggcatttaaaaacctcctttcttccaagatgtaaataaaaaaatcaacctttaaaggctgattaaaaaatatctttaaaacttttcgcagttcgctttgtttcaatcttcgattcgacaatgtctaaaaagaagtgtatcggcatgttagccactttttctgcatccatgccgttttctatcaaatctttagctattttcctgtaattgttgtagacagcttcaggtgttaaatcttcttttcttatttctgattctctgtcacgaacttttttgtatcgctaggttccccacctgtaattcgtccaattaactgtccaatcttttcaataccttcttgaccatttggtaatcctttttgaagttctatactagtaaattgattatcaaaagcttcaacgatgaaatccaaaacttcttctaatacttccatttgtacagccatgttgttttcgtattcttcttgcttgtttttgtattcttcctgttctgtcacacttaagttattaaattcttcttctgttagatctttaaaatcagcccccttaaaggctttgttaagtttcaaacctaattttgaaccttgaattgtttcaaacaaagtaataatcggctttgctaaatacttttgatattgcggctttcctgtttttgtaaatcctgtaattaattcaattgatgtacgttccattattaaattcctactttctttttaatttggccaaaataaaaagagggcgttaagccctcaaaacttacatttctaaattagattgtactgtaatttgcacagtatcagtttgctttcctgcagtcgctgtaacggtcgcattaccttccgccaaacctttaacgaggccagttgatgttacgctagcatacgtttgcccctcagtcactgcaaaagttactttctgtccagatggttcggttgtggctgatagttgtttagtagcatcaactttaactgtaacttgttcatcagtgacgtttacagaagtgacttcaactttttctgtttttttcatttctttttctacaggttccatattttgttctcctcgactagacatgaattcatcataagttttaccaaatgtttccatgaatacataatcgcgccctgtagtgcttccttttttatcatagccagtaacatgcgagctctcatcaaacaaacgatcaataaaattgccttctacgtcgtcattctggaattcaactttatcttgttttgtttgccctttgatgcttgaacgagtgaatttacctttgaacaagccaacccattctgaagactcatcatgattacgtcgttcaaatacaatcgctacatctggcgggatatccttagctccatatttataaccacctacaccttttttagcgccattcaagaacgccttatcgtcagcaggaacagtaacaaatgttgtcttaacacttagtttgccattagatacagcagttgctgcgaccatatcatctccataatcttcctcggtatcttgtggacggtctacttcaatttcttttaagaaacgaatacgtgtgccagctccagtttcccattcattttctgtatcttttaaaataggtgcataataaaagtttgataccccaattgcgatacccgaaactcctgtatctgcaaaatgttgtaagtttaattttaaaaatcttggtgcttgtttcaatttttcaatcatttaattttcctccaatttcattgataaaatcgagccttttgctcttataatatgtctgaatgacatgacgtcactctcgtataacggttctctgtaataacattgaaaatttatcactttgagtaaatcaacaattttttctgcttgctcgttcggttcatcttgagaccaccaaacatcaatttggtaatggtattctcttgaaatctcgttatcatcagcgtatgtgtcaggattgaacggtaagggatatatacgaataataggcttgtcagttttttcgtgaaaatggtcatctatagtgtagttaaacacattcacttcatctgtaatgttatttgcaataatagcgtttctaattaatttggtaacattaatcatttttgcaacctcttagcagtatcaagcattgtttttaaaactttgtttttcccttgcttttctgtttttgttataaacaattgtggtttttggtacattgttccaaattctgttgcatgaatacgatgtgagacgcctttagcgtaaccaattgtaacgattttctcacttgtgtgtctgtctgttttcacattagaaacagctatgtgatcgcgagcatgctttttagtattcgcaaaaggtgtattactttttaaaagcgggactaatgacatagccccagctttgacaattacattactatttaaattcatttttaaaactgcatttttcaaaccttgttcaatgttattactttcaattcttgcccccattaaattaccacctcgccatagacacgcaaataagatttatcttgataatctggctttacatatttgatgttaaacctttgcccttcatgcaagacgtaatgcttatttgttggtttataatcacctcgtgtatctctgataataatagttttaatgagtttgctacctgtattgagattcgtttgagtgtcggattctttagattcttgaatgcaagcgaaacaagagtataatattttcgtcttcggtttcatcggatttccgttcactctctcgcttacatcttcacaaaaatctatgcgttcatttaatttattggaattaaatttcattattttcactctccaaaaattgctcaaatgaacctctcaacttatgcacagtactcaaaaccatatgaggcgcaagcgataaatccctatccaaataagcaatacggttttcaaaatagtaacttgctaaagggtatatagcacgagcaaatagagaatgacttttaaaccaatcaatatatttacttggttcatccgtaacagcgctagctatttcatggaatgcccaagagtaatatatttctaataagtcgtcctctgaattgtgatctattttgcaatgcttttttaataacttaagttcctcagctgttaattgcattcaatcacctattcttctttcactctttcaagtattactccatgctctttcagctttttgttaacatattcagcacgttttactgtcatttcaacacgtttacctgactttaaatactggcctttctccaagtcagtataagatttcttcacttcatacattgccatagtttatcacctctttataaagtatcgagcacttattatgcttctaagccaagatcgccttcaccgcgttcactatcatcatattcaatcacaattgctgatttataatctaaaattctacagtcttgacgtacagcaatcattaaacattctccgaaatgcatgtagtcagtccatgatgcttggtattgagagcggtcaaataaaacaatcgcatcttttaagttaccgataatcaaagtgttattacctttttgccctagtacttcatcaggtaaaatttcgattttagctcctaataaacgctgttgcgttttttctttaacatctggctggattaaatagtttcctagcttatctttcattttgtctaattttgcaaacatagtttgcgaaacaatcgcaacattatgttcgtaattcagcttaacattcaggttaatagcatctttaatatcatctaaagattttgcttttttaacatctaatttcttgccttctttttcaaaacctgaacttgtagaacctgttgatcctttagtgataacatcaataattgctttgtttcgtgttgccgcaatagttcgtgccatccatagtttcaattcttgcaaaacgttaacttttgcatcttcgattgcttcacgtgaaattcggaagtaaccacggtgtgtattaatgtcatatgctaattggaagaatggtttaactgctaattcagggttttcttctaattcttcaactttttcaagtgctgcaacttctgattgtcgtactaccggatatttaccagaaccatttgtaacacgtttgaccgtcacatacttatcaagattaaactcaacctcttttaattttaaaatatctgtaacaatttcctctggaataactacaaatcctgagtctgtttttaacgaaccaccttgaatatcattgcgtgtttcaagatattcagtaaaatctctaacttcttgtgatgttacttttgtgttttgaatcgaaatacctaaatcattaatgtttgcttggtttcgataagtacgtgcttcgtttacttcaactgattgtggatttttttctgaagttccatctttttcttttagcttatctaattcttcttgtttttcttggatttgagaacgtaaatcagtaatttcttgttctaatttttctgctttttctaactcatcgttattaagtgctcgcgttgcatacttcacctttaaatcaatttgtcttttaatgtctgaaatctcagattgtaactcttcttttgttttcatttaatttcctcctaaaattggcataaaaaaatagacatcgctatattcagcatgtccaatggctgtatttgataatggtgttcaacttcaccaaatattatttaatatagagtgtttctttagtcttatttctaattcttttttacgttgttcttttttaacggtttcaatactacgtaatgctggtttaacatcagtgtctttataagccggataagtcactacagaaacatctgtaagttcacgaattgctgttaaagtacgtttgtaaatgttttcttgttcatcaaaacgcacttcatcgcctttatcgtcaagcataaaaccaaacgaacattgattgatgttgcctacacgcatgttctcatataaatcacgtgcaaatgttgtgtttggtaacttacaacgatatttaagtccaacatcatcagtttcgagctccaaagtacccgattttgtcctaccaattatttgcgatgggatatgatctactaaacaacgtacatcagataaatcagtgttttctaaagcgcgacgtgaaatcgtttctttgaatccaccaagattttcagaccaagtgtcaaactttaacgcatacccctctatgaccatttcgttgttatcatttgagcgtacctcaataatgttgccaactctcgtttccttactcattttcctcaccacctttcaattttttatcagtagctctcgatttattcatctgatactcatctacaagttcaatattcacatggtttaagtcgactctatgaatactaccattaccacctggtattggagctaatccatcacgttgtctaatttcatcgatattcatctttccagaatcaatgttaattttgtcaatttcagcttgtgttttttcatcaacaactcgtatttcagtggtatcaaatttaaattcacgattcacatattcatcattaaacttaaaattcaattctgcacaaacgcatgtaatataaggttttaaagttgataagtaatctaaattagcatccgtgatactcatgttcgctgtttctatgccgaacttatgcaatggaataccaaatacacctgctatttctcttgttgatgatttgttttctctgataagctttaaaacttctgtatcaacttctaattgatcaaacgtcattgattcatcgagtacgacaactttcccagcttgtttagttccactaaaacttttgtgaaattcttctctggcacggtctcttgcttttttgttatctaatacgcctttcattttcaaaataccaccagcatgtgtaccgtttcgcaagaaattattaaggaaatctttgccgttgttatccgactctattgtgcgacttaacgtatctaacagtgacaaaccatttataccgtccaatgaatagaacttaatgtctagcatatcctcgaacttaacattgcgttctataatatttcccttactgtctatcctttgatgaaaataatacagtcgacctcttgcgtctgatttcaattcaatctctgatgtctttctgaatgttaaattcataggtttccctattttatctcgtgtaatttcaacataaccatgtgatgttaacaaagcgctggcaaacacaactaatttaaatatatagccgttatacattggattagggcgtgtattcaacaaattaataactctgtcactataatcaatttgaccgttcacagttaaccttattggcatacgcgctaaatccgaagcaatcatcatgactgcagtaaagatatcactatgtttaattgcttctacatctttatattcacgtagttttgttccttgaaaacccggcaacgtttgaaccatcatttgcaaatcatcttcgttgtattgcaagtctcgtttttcacttctataaaaaatacccacaattactacctcctttcttgattgctttcatgatttaaaattaacgaaataacaatcaacgttatgccagtgcataataatcccatgttttgaccgaaagtcttatacacagaaatgttaatcacaaataaacctaataaaaaaaggatgctaaccaaattagcaaccaacaaattaaaaaatacatttattttattcaagtccattttgtcaccacctttaaaaaccgaattcttcgctttcatagatttctgcccaattctcttgaaattcgtgcatcctagcttctgtgaaagctgtgataatcgaaatgattggatctattttttgacgattcatttttttgtttatttttacattgtcctctccatcacgaatcaaaacagcattattaactgatgttgtaagtaacgtattgtcgttatgttgtatccgtttatctgcaacccacattctaaattctttaatggattgtgataatgccttgaaactctgtccaacttcaataagtggccaatctaaagccatagattcaattgttgttatgaaactttgcgcattccacgggtcataacaaaccgcttttacattcaaatcatgcgtcgttataaaatccataataaagtcgataacttgtttgtaatcaatcatgccgctgtctgagcgtgtaacgtctgcttcaccacgttcaatcactaaatcataatttattttgtctcttttcgctttttgttctaagttcgttcttaacccaatgaaagaatggctatgtaaaaatacttttttgttatcgtttggaaaaataaaccctacagacgttaagtcgtctagcctcgataaatcgacccctatatacacatctttaccattgatattaggcatatttgttgtggcttgttcccaatcttcaatatctagcaagctatcttccctttgtgcttgccataaattgaagtttttaatcaaaatcttatgatacgatgtgcctttttctaattcatcttgtatatcagacttgatgttttgaagtattgtttttctgtgttcttttgattctaaaagcggcattgctttaatccatttcgtttcatcttgtacctcttcttgtgaatccatttcagcacaatatacaaagtaattatcagctcttacttcttcatttaaaatacgtttaatatacttatactcttggtacatttgactatttaaattgtctccggccgttgaaaccagtagggttaaaggatttttttgtaatgtcatacctgttttaaaccttgagtacatctcatcatcaggcatacttgccaattcgtccaaaatagcaactgtaggatctttaccatcaactgcatctggattattagacaaaggcgcaaacactgagctgcttaaaatatcttcaatgtccgtctttcttacatctgttttttcacggataaacttacttttacttcgcattaagtttacttgttgacttgccatcttgaatattgtttgcgcttgtttataggttgatgaagctacatagatctgtctattgaatttaggatattgtccaaacagcaattcattaacagacataccagacacgattaaggatttaccttgttttctagccatacttatataagctttagtaaacattctgtattgacctctacgccaaccgtacagacttcccacaatgaatttttgaaattccataagtggcataggttcgtttgttttagggtctggtagcatttcgacaaattctattgctttgttagacaaatgattatcccaatggcaaccattcggcgggttctccataaaagataggtgacgtttacagacttgaatgtttttctgactggctaatatttcacccgaaaccaccttttttgcatattgagtaacgtaatctatcattagtcatcactcgcaaatttcatgtatggatcgtcattttccttttcttcaggaaccataattcgtaatcgactatcaattgttaatcctaaagtattagctgtttgttgcatgcgaatgcccgctttttctttaatgttaaacgctggattaaccttttgatttcctctgtcatcttctaacatcaaactttcctgctctaaaatcaaacttgctttaacaaaatcactgtaaaaactacaatattgtgccagctgtgctttatctaagtttgaaattggcaattcttgcatgtgtggtaatattcttaagtattcttgtttcgctatttcatctaaaaagtgcggtggttcagtatcgattttagaaaatttatttaattgagcttcttgacgctctttttcaataatttcttcttttgtataattcttgttcgaatttgacaaaagcttcttaggtctacccgccataaattagcacctcctactaaaaaacttagataaagggaattttttgagaagaaaactctgctccgttctccagaacctttcattgacgcccatttcatctttggggggacttcctatttttatcttttttaatatttcttcaaatcttcttttgtcttttggttatggcaagcatcacacaaaggctgtaaattacttttgtctaatcttcttgcccaatcaactttcgttggtacaatatggtcaaccatagtcgcttgattgccacaagaaacacaaataaaatcatgttctaacaatacaattcgacgcatgttttgccacgttttcgatttataaaatcttaaatactctggatcgtttcgacgtctcaaatcattgtaattttcatttgtatattgcttgtgtttatcacaataactttcgttatgattaatcaatacattacatattggatgaccacatcgcttcataatagacaatgcacatcactccttgtcgactttcttaacatcttgcacagttacttgtctatcatctttatcattgctaattaacaataagtttcctatcgatccatcaacaagatacttactaccttgaaacaatactttgtctccttgtcttataccattgtctatattgatagtctgattaggtttattcatcaagatagtgttaacactatgaccagctatctcatccaagttaatacctaatacgttagtaagattagctatattccacaatgcttcgctaagttcatttatcataattcctttatctatcggtacattacaaaacatatgctgtttaattagatctgtaacattgcctgtagattgagttaaacctaagccgtaacaagtaatagattcatttaaattcaattcatcattgtgtgtacgtgtagctatctcttggtactttgatatctccattctccacctcttgtttataaaaataaaaaccctcacttaatgtgagagttcaaaagaaatataaatgttttgctacacagcaattataataaaaaacaatatgtagcatcaaaattagtccgatgtgtacgatttgtacgatgtgtccgaactgtccgatgtgtccgaagtgtcggtttcttgttgcaagttataaagtatatttactatatcttttactctagaataaaaattgtctctgcctatatcaagaatgctcatgatcctattatggctttctcgttgttttaacatttgtaaaatatgataatctttttcattcgtgatgtattcttcatattcatcaatgaacgctatcttcttaatcaagtaatcgtactttctaagcgctttgtttttgtttataactttcactaacactttattgctagtcgtgcctttagcttttggcatcgcagattgataaccatattgtgcaattgatgtactttcgttatcgtagactttactgtctattatgttcttcatccacttgtagttatctatcatttcacgtatttctttcctgttatacatgcaatacctccgataatataaattactttttaatatcgttattcattcgctttaattcaatcctgtattcttttaacccgttgtatcctttagttttaactacttcatcaagtagataatcattcatatatctgagcgcttgtatctcccttgcacgatcactattaatactgatacaaactaatagcaatatagcaaatacaatagtcatagtaatccacatcactcacttacctccgctcgaaagacgtaatcactcggcgcctctacatcatcattagccgtcatcataatatatacttgctccgttaaatacttacctagctcatacattgctagtaagaataatagtcttaatatttgtttaatcatttcccacactcccttatattttcaaacaactgacctaatttaataactgcctctcttttaacttgtgcctcgcacttctctttcgcttcttctttactctccgcctcaacaactgtaaacctttgattgctcttagctcgagttatgtgtgtatgtttacgtcctgttgaatctttgaatgttgtaactaagtattgtgtcattatttaacctcatgtgtaattgtgtaatacattacttttccacctgattttctggcaacatcactagcgtttttagcattcaaatattttctcgcatgtctaacgtcgtcagtaaaatcatatccacctgcataattattatataaatagatccctttattaacctctacaacataatacatttccttcttactcacttcttatcactcctttgaactcgcttaagtttttctacgaaacttattgctaataacagaactaaaatagccattttgtcgtacgcatctgcaaaaccaagtgttatagcaagaattataatcgccccccacttatacatatctgcacgattagcgttattagcttttaaatatccctcgattaaaatatcgaaaatcatataacccaaaactatcaaaagtaatattgttatactcacttccccaaaacctccttgaccttatctaatatgtctttacactccgctacttccgaagcctttttctccacgttctgaaacactctcgaattccttcacttgctttagttcgggcgtaaagataggtacaataactaactgtgctatacgttctcctttttcgatacggtaactacctagcttatataaatgacgttctttttcgaaaattttttcgttatcaatatctcttaaaaagatagtttgcattttgtcatcttcatggtcattcttgatattaatccctaaattaccatgatatcccgcatctatcttgcctgtttcaatcactaaatgcgttttactacttacaccactacggctagttaataacccgacatagccctctggaatgcttacagctacatctgttttgatcactgccttttcttgtggctcaagtacgacagtttcagctgagaatatgtcataacctgcatctgtcttatgatttcgttcgggcattctagcgtcttttgataatagtttcacttgtaggatgttagtcatttccctgttcctcctcatatttatagacaacttgacctgccataatccctactgcttcatcaagttcaataccttctttaactgaatgttgaatagcatttgtcattccctcaagtatttcatcaaacgctcgcgctctcttatacacgtcttcaatttcttttaataacccctctgtgtcattaccgttatacgcactagcacttataactgactgttctatttgttcacggttattcattagtgtcatcctccataaaaattttattgtttaattccattccaaatttaactctttcatcatcgttgccgaattcgtttattaaatctttttcaacactcttgcaatacctatcccatgcgatcgctttcttctccagctctttgttgtgttctcgtaacttcgctatatccccaataagctcatcacgttgcttcaaaaacttgcttgcttcatcaaaccagtattcactttgcttttcgtaatattcttttgaaccatgttccattatttaatcaactccccatctttccagattaacgtcatagttaggtcgtcgtttaagatgtagaatgctttgatagggaaacatctgtcgtcatttaaactttcgtttatactagtattcctatttgatgtaggattatattctccttctgagatctcgtacacttcaaacaacctatcaaatactgtatctcccgtgatttcctcttcaacttcgactacaaaagtatcttcaggtgttataaaataactagtaaaacactttcttccatcctcccaagaaaaataaataaatttttcattatctttgttttctgtgcaaaacctctttcctgttgttagctcaggattcttccaagcccattggataagttcaggtaaattcatttctttttttactttgattttcattgtttactatctcctcttgaatagtgaatttatcgttaattgatacatatccagtcacattacataagatgctatcaacatcaaaagttacatgacagttgtgcctaacaccatttggatagaatcttttatttcctgataatttggggttatcccaaggccattggataagttcaggcaagttcacttctttttcaattttgattttcatcatttttggatatttagtttagtgatcttgctccatctccttaaaataaagttagttgcttctgttcctcgtattccaaaccatgttgctttatatatgtttcaagctcttcagctgtatcaaatgtctttttcacgccttgccaacctggcacgatatgcccatgaaagtaataagtgccgtttactacatggatatgtgccactcgctcgttatcctgatacagatatctcttagagccgaaaaattggtttaagtattctttacacatgttatctgccatgatctacttcttaactttcacgaatatgtcgttttccatcaggtagcacgcataacgtcctcttggatgtttctgaggtacattaaacaagtgtggcttctttcttcttagctcagcctctttctttcgctgtctttccaatttgcgttcgagtctagcttgttccagtctttctattgttttcttttctctgtactcgcttaaacgcatgccttctggtgtgtccattgcttcatgtagttcccaaccgtcttttactcttttagaaaccattccgggtgttataccgtgactttcaattaattccatttcaaatttactgaacctataaggtttatcgtgtatccttacaattcttgctgttttcaccatttattccacctctacatttacatttctaatttttaaattgtcatactctagtatttcgtcaggattgttatataagtaatctgccagcgtttctttttctttatccacatcatcaaaatgctgatattcaacttcggtaggtattcttatatcaatcgttgcgtttatatatgcttgttgttgcattagatcacttcatttctcttttgcgttctcgtcttgctttaattaattcctcgtacgtaatccatgttttacctgtatacttaggcgctttacatatccaattgagttttatgtttctgtatttgtgtctgaacatcttagctttaagttttgctacttcggttggcatacctttaatgtcgataacttcaatcagtttgtcatcgagatataacgcaaagtctgcaatatattcaatctttcgttgtttatctagttttggtaataattcaaatttcggttgtagttcgatacgattatagttagtgccattcatattactttctaaatatcggtaatattcgcactctactttgctatcaaatacaattcctttatactcaactttcttagcgttgtatttactcattgtgccacctctaaatatcaaatatcgttgcttgtaatcctagctcttgctcatatagaagcccgtgagcgcctttgaatcgttttaggtcactatcagtcataattttcttttcgtcgctgaaatgagctcctgtgagcgaataaacttcatttacgttgtctttatacttgatgaccttaatatcttccgtgccatcttctcggtataagtaatatttttctttcggcatttttaacactccttaatgtgcgttttcttccagttgatttcattcataattttctcttcaactctgtcgtaatcatcaaaaggcgataactcgttattgtctaacaatctgttaactgcccaaccagtttctatatagacatttgctacaatcgggtcattttgctttgtctcttcatacatcgatttcaataagcttttgaattgcatgatgttcatgtgaaaaacctctgcgtcttcttgtaatactcaaattcaattattccggtttcgccgtctttgtttttggctatgttacattcaacaatagatttgcctgtgatactgtcatcttcttcacggttataataatcatcacggtaaagtagcattgccaaacttgcatcggcttctattcccctgattctttcatgtccgatagcattggacgtttatcctgcctagactcgacaccacgattcagttgtgaaagtagtacgatgattgcgcctgtctcattagcaattatctttaagtcgcgtgatatcttttctactgctacacgtctatcaactttcgcatcagtatccatcagttgaaggtaatctataaaaataacttgttgcccgtctgaatgtctcattgcttgtgctcgcacatcttgcggtgtgatattacttttatcagaaatatcaatacctaacttcataatttgatccattgcattcgttaacttcgttaagtcatccggtgttaagttcctgatttcttttatcttggttaactcaataccagtaattgttgataacatacgtttcaatactgatgtgccagttgtttcgagactaaagaaagatgttttatatccattttgtgctatgttcagcatcatgtttaatgcaaaacctgtcttacccactgagggacgcgctgcgatgacgattaattgtgatggctccaatccccctattttgtaatccatgagcttataacccgtcttaatttgcttcttagggctatcgctgtataactcttcgacaaactcctcaacaaacttcttggttccatcttcttttttgttagtaattgtttttaaatccttgagttcatcaatcaagttgttaaagttttggttcgtaggttgttgtttgaactcagtgaccaattcattcgctttgttgagttgataactttccaataattcttgttggtaacgttcaaagaagccgtacccaatgaaatcggagttgtaaagtttagttatagtatctgcatctaaaaattctttatctttagttgcttttaaataaatttcttgatggtctatctttccagagtccattacataattgaaaaaggttttaaacttttcgttcgtaaacatgtaatctttaactcttattttttctagtacgtccggttgtttaagtagcgtagcgattattgtgctttcaatttcgaattgcccataattcattcgttatcgcccccaaattctgccaacttattcatgaagttatctagcgctatttttctttgtctgacatattcggggtcattctgcattttccattggtgtgtagcggtttcgttgtctaccggctcgatagatacttttttaggtgccttacgcatgattgctggtaagttaggcgggtacgggttgttactgttgatatatccatctactgcttttacagttggttgataatctccgttttgacttaatacatcaatccacatttctaactttggtttatcaaaatcaatgttgtatacgtacctaacttttttaataatttctaatgcttgtgttttgctcatcggcattagtagcatttttcctaggcgctattttattttctgcatcttcttttgttttgacattctctttagcccagttgttcaaaactttaattaagtagccaccatgcgcacttttgcttttagtgtactcaacacctacttttacaatttcaaaagcgttcgtacctatatcatcaatagcaaaccctaattgctccatttgattaggcgttaacttatcatctaaatttgcgattatatattttattgaagatgagaagacggcttctctttcttcttctttattcttatattcttcttctttttcttcttcttcttctgtatcgttacgtaacgttacggtaacgttatcttttgcttctagtaactttttctgtctctcacgatagcgttgttgtcgcaatttatttttttctttatgcttagctttgctatctaagctttgatgcttctcccagtttgtcacttttatgacaccattaactttttcaatcatgcccaatgtctcaaaagtttgaattgctaaccttattgagttaataggtctattaaattcgtttgctaacatttcttcgttgtacggcaagttttcggatagcataatgtaaccttgttcgttgtactttcctgataaagttagcaacttgacccaaagagttataattgtatccctttccggcaaagcttcgatatatttgattttgctgtcatcaaacatgccaactttaagttttatccacaatacttctcccattgtcttctcctttcagtgcttttattttgtccggcacttcccagttagatatgaattccttaagttcatctgtcataggtacatcattaaggattgcgtcagaaccatgtaggtataacgaacatttgttatagactaatctcgctttgtttaaatcgtcatatccgcctaacgctatatagttgccagaataaaatatttttgaataatatctatgttttattttgtttattcctcttaaattgtttttatcagttcccctcttcaattgctttatgtttgttttatagtttctttttttcagcctattatcttctccaattatattaaggtaaccaacaccaccccaatattcattaactgcattgttgtaagcttttgctgcttcatcttcattaacaaagtgacctaagtttttggtttttttatcaacagctatacatgcataccaattattattttttttatcccatgaaacgcctttatatttagatgaattgttaaacttcgctttgctccatcttgttttattaccttcagttgttagatttttttttgtgaaatcattgttttttattttttggaaacttttttttagaataaaatcaggtaaatgctttttatcactattcacaatcattctgtaattatctttaaaagttttatgccaagtatgctgattaactctcttgtaatcttcatcatcaactaaaatttcttctccatcttgtaaaaatatcgatttaaccattattctcctcctttcaacattttgttgagcctctcatcaacttttagccacgagtcatgcaattgatatttatcatcaaatgacttaacgccaatcgcatgttgctggttatgatgttcgcgacataacgctaatacgtgtttgtcatagtgattcatcttatttctgttcatgcgtctaccgtctgattcgtaatgtgctaggtcagcgtgaggctttccgcatataatgcaatgacgcgtaacagttgcccaataaagataatttttatcttctttcatcaatttgcttgttttataatttaatggaatcgcatttgtaaaaatccactcaaacatcgcttctataatttgcttggctatagttcgagaacaatttgataaagatatgcgttcttcatagccatataggaacttcacataatcttggaacatttgtctcatataatctcgaggttgtcctgtatgagcttctatatcgttacatagtgcgaatattaacttacgttgttgtccagtaatttgaaacggatctatgacgcttacatcgacttccacatcaaaaccgttatcaagtagtaatgtttctttattgcctaattcaacacccgagatgacaactgttgttgtaccgtcaacttgagtgatataactagtaattattggcatctaatcattccaatcagaacgggaggtctgaaaaatcttcttcagtattgtcaaacggattattaccagtttgagcttgtccttgttgttgataattgtcattttgttgttggttgctattcttcggttctaagaattgaacactgtccgctactacttctgtaacaaacacacgttgcccgactttgttttcataactgcgtgattgtaaacgtccatcaacgccagccaatgaccctttggataaataattatttacattttctgcttgttttctaaaagttacacagttaataaagtctgcctcacgttctccttgagcgttagtaaatgttctgttaactgcgatagtgaaagtggtaacactcacaccattcggcgttgttctatattctggatcttttgttaagcgtcctactaatactgttctgtttaacattattgttttcctccagtaattgtttttgcgttgtttcgtattttttgaatagcttctgctgcttgtttttctgttaatttatagttatttatgtcgaatttttgttctactatattttgtggagcttctttatccgtgccctttatcaatttagtgaaacttataacctctttccttaaaatccctatagtttcgctacttgcccattgcgttctagtttgctgttttggattattattttttccacttgcttcatttccgtcatcgtcttggtcactagtaataccgaaaatcgcagatagcgaataacgtttaagataacttattaacgagcctgctccttgtggcgtattcttttctgcattcataaatacaggatcatactcgatatattcaccgctttcatgcataagcattgtagcgactcccacgcgcccgtctacatcgttcaaagcccattgagtataagacagtccatgaggtgttgccgcctcgtcaatggcttctactacgttctcaagaggtacgtattttgatttgaaaaatggattatttttatctttgagcggttgttttacttctttacgaaacgcaaccatagctttatttatttctacaactgtttctgatttattcatcacttaatcaccaggctttctgttacctttaattcaacgccaggaatatctttcccatctttcaaatcatcgattagttgcttagaattaagtttcggggcttgtgatagccaataatcctttggaataagtttttcatcgataatatttttactagccccgtttttgcgcttgtaaatatgattagtagctgtgcggtaactatctacttcctgtgtttctaacatctcttttaagtaatctcttaaacgatcagttaaattttgtttttgtttttttaaattttgaagtcgtttaatctctttatctatgacatctatgtcacctaaagtttcacgtctccaattgacaatgttatctactttgacattcatttctgcttgaatagaatctaatgtgtcttttaataatgtttggtctaattcatcttgattagacaactctttaaatgcttctgataactcatatagattagccatcgcttaacacctcccccgctagcatctttttagctttctcgtatctagccaatattgtgttatcgtcatctacattgttgtgcatatttattgatgcgacttttcctaaatagtcatcgctgtagtgccagacccatataacgttgtacttataatcaacttgataagaagtgctttgtacacgttctattaagtcaattgccattcgtttaaatttatgtggtttcatatcgcacctaccatttcatgactaagttaattagtctgtcataatcatctgcgttttcttcaatccattcgtaaatagattgatttaatatgtctaatgctgtgtatagatcgttctcattagttatgtttatgccgtcgataaacttatcttctaaatctaagatattcaccagaatgctgtggtccttcttcttaactgctaatttaaaatcaaatccgtctacattaattaccttctgacatacatcgcctatttcgtaatacatcttgacttcctccgtttttcgttttatattgaacgtgaattaattttgctaatcgtttgtctctgttacttgttggcgcaagtagcagtttttttatcttattatcagagatgcttcataaattgtgccttttggttcgcccggcactactatttggccgaccattaaatattgatgcactcttcttctggatgatttcttaagttttaaattgtgtaatactatgtctccagtatgtctatctaaatattcaacaagataatttctgttctgagccgacatgtaaatatgcgggttgttgtacttctttctatattcagtgatcgttttaacttcatcatcacttaaaacagcttgttctgcctttctttcccattccacactaggtttaacgtattcttcaaaccaagtcatttaatcatccaccccataaaagtattccttataaaatatgaatgtcactatgcttgcgaatcctgcaattgaccatgctgtagtgaagtatagaaacggcattaaacaaatcgctaagactgtgaaacatagcactgctattaggtagcttttataaatgttgctcattttcttttttctcctctttggttgtttcatcgtttatcaacccttgcatttccatcagtttttgaggtataccagcttttaactggatttcgtataacatttgttgaatgtgtggtggcatttctaccattcctttcgtgtataatttagttatctcctagtgaaaggaggtgataagtatgtttgaaggaatgaaatataagccatctgaatttgccgctgcatatatccaaaccttgccacatgcattgaagcttgaagactttgatacagatgatgaattcaaagaatatctcgaaaatagacgtgagtcttatttttatgagtatctaaagtctcttgaatttgctaaaagtttttctaaacgagaagatgaaacgatagaagaataatgtgagtgcataccgtttttttctgcctttataaccttccacgtcacaactgccattgtgatgaggagggttgttttgtatagtgtgttcatttgttgttcctcctaacaccattttttatgctttctaatcaaatactcttctaatttagaaatattaatcaatgtgcccgttgctgaataatcaatgtataaattttgcacacctaaattatcttcacggtaatatttcaaccagttgtatactgtacttctacttactccaaataatcgatggatttgtgtaggtgttgcgtataactttttcacaaatttttcttcgcctcgatatgtgttttctggcgttggtggtgttatgattttgggcatttttagcactcctttcttgtataatgttgttatttgctaatagtttgttcggcgaacttcaaaaggcgacgagcagattcagtagaattttcagcatctttcggtatggttaaagatttgttgtttagatagtcactcaacgccctgctactaatcacaggttttctagtgtgcttctcaatcttccaaaccttccacgtcacaactgccattgtggtgaggagggttgttttgtatagtgtgttcatttttaattcctcctatatttcgttttcgaatttcatttcaatttgcttaattctgtataaagtagcttgtgacgggaaccaattagcaatcatttcaattacatcgtcgaaatgtttttgtcttacattcgttcttgaactcgcaccagtcatctttttaacttctgaattaatatccctgaataattcgctacgttgtttttgatttgttatcgcatgtagcctttgtatgtgagctactctttgattgatagttctagttaagaaattgtaatctcccgcatccagtttttgattttctttcaaatcgataacatcatcttttacgtttttaatttcttgttttgtttgttctgtagcttcaaacattaatctcaatgcttgcattgggtcgctaggtacttggtaagcaccagtttttcttaacgttggtaaaacttccgaagttacccagcgtttaaatcgtttcgcattttctaatttgctagaaaagattaaactgtataatcctgattcgttgatgatcgttacatttctgttttgacctgccgtcgcgatttgcgacgtcagcttatcttctgcatcaacatgttttgacaaagcatctcgtccgtttgcgtaacctaaaatgtcagcaacatcttttcctataaaatatggttcgccgtcaacctctaatgtccttactggtaattcttcaaaattaaatgtttgtaattcttgcataatgtttatgctcctttcgtgtataatgttgttatcaacctaaggaggtgataagtatgaaacttctagttactttaaaggatggttcaaaaaaacatgtttcggatttaaagaaaattgtttttccaggatatgaaggaattgaaactgttacaaaagaggaaatcgaaacattttttctagaccctactaaaacttatgtgtttgttggatctcaaactctaagtgtggaggcagggcaaatccttaccgttgaatttagctaacctttttcaacaactctgcaactgctcgcaacagttcagggttgttgtttctttctaaacagtaactagcatgcttgagtaatttgagttttaatttatttttttctttcgcaattctaaatttttgtaacatttgttgttcctcctttattcgaaatcatcgatgacaaagtttcaatccgtttttggtaacgatataaatagaagttctttaacatgtcatacattctgctagcttcatcgtattcactctcttttaaatcagaattaagcgttacaccaaaagctgataatgtaagttttctaatgtggtcatgaatctcactagcgtatgctttgtaattttcataacatccaattccgtgttgatatttctttaaagataatggatgtcctaagccgagattgtcagcacctcttaaacgttctgtataagcaaactttttattaatttcatcaaaatcgttatggctgattcttactttgttgaaaattgaacctgaactgattggtttcttgccatttatagcctctctaacttcttttgctataatttctttcaactcttctttggttaatgtgatttgttccatagtttcctcctgttacgacatttgtacaggtttctgtacattttgttcaaaaaaatatctacctacttttgttggtgggatttctaataattcacagattcgttttatttcccattgtgtaaataaattttttccttgcaacttgtgattaatagatgtccttgaaatagggattgcgttcgctaaagaactttggctatatctatactctgccattctttcgtacagcaaactataatcgaaattgtatatcataaactcacctcccttcttgttcggttttctgtacaaatcaattaaaacacctttgtttaaataagtcaacacataaaatacatttttctgtacaatatttgttaaaaattattgataatcgtcattgtacgtagtattatgttcttaggaggtgttcagaaatatgaacagttttaaggatagattaaagcaaattatgtctgaacggaagatatctcaatcagagctatcaagaaggactggtattggtagaaactcaattagcgattatttaaacggaaaatatgaagcgaaacaagacaaagtctttgaactagcaaaggctttaaacgttaacgaagcgtggcttatggggtttgatatttctaagaatagaaaaattgaaaataacgacatcacttccatatacagtaaactcacgcctccaagacaaagcaatgtactaaaatatgcgactaatcaattagaagaacaaaataatgacagtgataatctggtagatttcaattcttacattcaagaaaaatccgaagtggatatatatggttgtgcgtcagctggtattggcgaaagattatataacgagcctatttcaaaagaattcgtaagaggttatgtccccgcacatgatatagctttaaaagtaaatggagactcaatggagccgttatttaaaaacggacaaattatattcattgaaaaatctcacactatcaaagatggacaaataggcgtctttattataaatggagatgcttacgtaaagaaagtttatgtagaagataatagattaacgttggtttctttaaataaaaagtataaagatttatatttttatgataacgaaagtgtgaggttagttggaaaagttattttataggaggtagtaaaatgaaacctagaaagcaagatgaaaaaatattatcagatcaatacagttactttgaaccaataatcagcgacagttgcgacataaaattcgacgaaaacaagaggagaatgggttctatattcatttcacatgaagaggtttgttttataaggaaagaagaagattatatattcaaaatctcattatcagaggtgatagattataacactgttgttactatttggaaaaaccaagcttttttaacattaaacgataatagaaaattaacagtttatttcgtaacaaactctcctttaacaggattcatctcaattttaaaaacttatatgcaattatctaagaataaggaaacaattatctcgaatgattgtctacctattaatgatgatgaacaaactaaagttgaaattttcgacgtcgtaggattaaattatgaaggtcgtagaaaagaattaaagaaacttatcaagaaaatgaaaaataacgacgatttctttttcttatatagtgatttgaaaggaaatgaacttaaagaagaattactttatgaagacaaggtgtatgaaatttctgattacgaggttattcctggtgtattcttacaaaaagaaccggataatccttatgatcaaaacgcgataaaagttatgatttcaaatgaatactctgaatttcacgttggatatgtacctagagagtatgcttcaagattagtcaatcatatggacaacatcgtttcttgtaacgcatatattaatggtggtaagtataaaactttagattatttagaagagaaaatcgttactaaagaatcagactatggattacgagtacatttagaatacaaagtttgagataggtaaagattgtatttttataagtaattactataaataatagaaaattcatttcacaggagggtttaacatggatttttaaagaagttgacattaacattgaagagtgggaaatggttgaaatccccttttatacagaagaagaactgacttataggttgaataatggtttacctataactaaaagtgaacttgaagaacaggagtcgaaaaaatgagttcttataaagaaattgaacacttacacatcaatactggtggcaaagagcttactcaagaacaaatagaagaagccaaagcttttatagacagtcaagaatttaaagatatgattcgagaagctaaagagtcacgtcaaagagttatggagtctaaaatcactgatagaactaaaatgtgattaacagcgcctgtgtggcgcgaggaggatgagggatggaaagagaaaatctaaaagaacgtttattaatcaaatgccaagaagcatttattatgggattagaattgtataataaacctactattaaatataggatagaaggattttcgttctttatatgtaatgcttgggaattaatgttgaaagctaaattattaaaagatggtacatctatatactattcagacaatccaaaccgtacattgaacttgtctgatgtaataaaaaatgtctatactgataaaaatcaaccattgagaattaatctagaaaagattatagatttgaggaatataagcactcatttggttacagaggattatgaaacagtttatgctccttttttccaagctaatattttaaatttttcagaacaactacaaaaattccataatatagatataactcgtaaaatcccgcaaaactttttaagtttatctgtaaacatggatatattaaacaatgatgaaatacgcgggaagtattcgccagtcattgccgaaaaattaataactcaaaaaaatgatttagcagttacacaagaaacaaataattctaactctttagtaattcctttgcaaaacactataattattactaaaaatccaaaaaacgctgatttttctgtaaatgtttcaagtgattcggaaaatgacgctaacatattaagagagttaaaagaccctaacgataagtacacattgagttttaataatgtgatacaaggtatcaacaaacagttaaaagctaaaaatttagagtttaactactttgataaaaaagatggaaaaaatgaatttaataactatactttgagtttaattataaaattctacaatttgaaaaatgacgacaaatattcttatcatttcgcaaatgtcactagatattctcaacaaattgtggatttcatagttaaagaaattaaacatgacccaaatataataaataatataaaaaaggcaaataaaaaaagataaccccagggtcataggaattctcagctttcgcctacccccattcggggacccagagctaatccttctcgagttatcttacttttattataaattacgttgacaatcatttcaaggatttttcacgggtagcccgcctacccttattattttttgccaattttgaggagggagaagcaaaatgccagtatataaggatgataatacaggtaaatggtatttttctattagatataaagatgtatacggtaataacaaacgaaaaatgaagcgtgggtttgaacgtaagaaagatgccaaactagctgaaagcgaatttatacaaaatgttaaatatggatactcggacaatcaaccctttgaatatatattttttgatcgtttaaaaaatgaaaatctttctgcacgctcaatagaaaagcgaactacagaatataatactcacataaaagaaaggttcggaaatatccctattggcaaaatcactactacgcaatgtactgctttcaggaattatttgttaaacgatgcaggtctttctgttggctatgcacgatctgtgtgggcaggttttaaagcagttatcaattacgcaaaaaagcattacaagctcttatacgaccccacattatcggtaactcctattcctagaacaaaaccacaagctaaatttatcactcgtgaagaatttgatgaaaaagtagaacaaatcacaaacgatacttctcgtcagctaactaaactgttattttattctggtcttagaataggcgaagctttagctttgcagtggaaagattacgataaaataaaaggcgaaattgacgtaaacaagaaaatcaatttaagtaatagaaaaattgaatataatctaaaaagagaaacctctaaagggataatacctgtaccaaaattaattagagagatgcttaaaaacatgtataatgaatcttctacaagatataaatattttgacgaaaactattttatattcgggggtttagaacctattagatacattacttattcgtatcattttaaatctgtattcccgaatctaaaaatacaccatttaagacactcgtacgctagctatttaattaataatggtgtagatatgtatttattaatggaattaatgaggcactctaacattacagaaacaattcaaacgtactctcatttatatactgataaaaaacatcaagctatgagcatatttgattaaacggtatcatattggtatcaaataacaattaaggagtttataaaatgcgtaataacaagcctaaaataagaattcaaaacgatccatgggaggcatataacgatgttaaagaacatggccaattaactttaagtaacatcgaatttacaactacaaatctttgtaatatgcgttgtagccactgtgcagttggttatactttacaaactgtcgaccccgagcctttagatatggacttaatttatcgtagacttgatgaaattccaaatctgcgaacgatgtcaattacaggtggcgaaccaatgttttctaaaaagtctattagaaatgttgttaaacctctattaaagtatgcacataatcgaggtatatatacacaaatgaattcaaacctaacattgcctcaagatcgttatttagatattgctgaatatatcgatgttatgcatatctcacataactggggaacaactgatgaattcgcaaatgttggctttggcgcaatgaagaagcaaccaccgttaaaagctaagttaaaattatatgaacaaatgatttcgaatgcacgtacattatcagaacaaggaatgtttgtatctgcggaaacaatgctcaatcaaagtacgctaccacatttacgaaaaatacatcaagaagtcattcatgatatgaaatgtagcagacacgagattcaccctatgtatccagctgactttgcaagtcaattaaatgtgttaactctagcggaaatgaaaaagacaattcatgatatattggatttcagagatgaagatatttggatgttatttggtactttgcctgtgtttccatgcttaaaagatgatgaagatcaaaagttactatcacgtttaagaactgctaaaaatgtaacgactagaaatgacccggatggccgtagtcgtttaaatgtcaatgtatttacaggtaatgtaattgtaactgatttcggagatgaaacaggtacaatttcgaatatacaaaaagataaattaacagatgtatttgataaatggttatcctctgatcttgctaaatcattaaattgtcattgttccgagtttagttgtttaggaccaaatgttcttgttaaaaatatgtactatccgaatatggattttaaagataatgagcgtcatatgcacaaacaaccacaaattatacaattttaaaaacgcttaattatgcggaaaagcactttattgataagtagtctccgcatattttaatgctattacaaaattaaaaacaattaatcgctggcagcactctacttaaataataaaggtcatttaataggactaatagtatataataaaagggttaaattttaattaaaaacataaatgtgcataatcaaaaagacagattgtaggtggaatattcgaacataacagttcaattcatccttaacaatctgtctttatatttttagtctctaatatgttgcacttgagctaaatattcaattgtttgtttactttcaatgcgacgtgcttttcttcgttcaacacgttgtggtgctgtatcataaaaccatttttcaacatcatcttctggatatactccaggtacatgtttaggtttgccttcatcatctaacgcaacaaatgttaggtaacttaatgcagctaaatcatgcatgttattaaatacatcgtcaattctaatttgaacgaccacttccatcgaacttgtcccagcgtatgaaaccatcgctacgtattgtaatatgtcccctgttttaatcggctttaagaaatctactgagtctgtagatgcagtaactacttgcgcaccagcatgtttcatagctgtgattgctgcaatttcatcaatattagccatcaatgtaccaccaaacattgtatgatggtgattcgtatcttgagggaaaacttgtctatttttataacattttgattctgacatagatttcattggtctgtcctgatttgtcattattttatctcccaatctatactttaatcacgtatttgacctttaaatacatgtttcatttcctactcagcacctcaaaataacatttattaaaatgttgatgcccaatttccattttcaaatactagttcttttgaaccatcttcgaatatgccataaatagtcaaatcactactaccaatcatgaagtcgacatgtacgtttgaatcatttaatccgcttgcaatcttttcctcaacagtcatttccgttccaccttgaatattgaaggcgtaagcagatccaatcgctaaatgacatgctgcattttcatcaaataaagtattgtaaaaaatggtattacgatttgatatcggtgaatcatcaggtactaacgctacttcacctaatcttcttgaaccttcatcggtattgattaaatctttcaataccgcttcacctttttcagctgaaaaatcaataatttctccatctttaaacatcaatttaaattgatcgataattgtgccattataacttaaaggcaatttattagtaacatatccatctactctatttcgatctggtgctgtaaatacttcttcagttggtatattagcaataaaagcttgttccttgccgttaacataacttgtagcatcttcccagatatgatttttcgctaaacctactgttaaatcagtaccttcagatacataatgcaacgcatggtagtttttttgctgtaatttttgtgcgtaaacacttaaattagcgatgtgttgacgccaattttcaactggatcgttaccatcaattcgcacaatatcgaatacctcgtcaataaacttaatatatgcttcttctacagatagttcaggatatactctcttcgcccaagctttagatggaaaagcagctacgacccatggaaattgatttttttgtacactttccatatatcctttaaatgcgcgtgcgttttgttgttgaaatgcttgtaatttttggctatcgataccatccattaaatcaggatcctcactaataagtgctaaattagcagcgccacgtttaacgtaatccattctcgcttcaacatcatatgattttatctcatgattagcaaaatgttccacagattcattttcaaattttaagcgttttaaggttggatcgctatatacaacacgtacatctgaagcgccacaatgatatgcttcttctacaattaaatgcgttaattctaatgtttctaccgatgatctaataaatactggctgttttggttgaacattcataccaaccttaactaaaagttcagcgtattgttgtaacttttctttgtaattagtcaaaattcccactcctagtcgtgtcgcaattgtcctaaagcgtcagcaatagctgtcacttcacttggcgacaatctttctcttgattgaacaaaatcatatatatctgttaattcttcttcatttgcatttgtatatttttcaggatctaataatccttgattaacaatatttaacttctctctaatagctaatactttctcttcatttgtcatagacacaatgttcacctctaataatagttatgttatcaaagtatcacaatttaataaactttaatagaattttatataatctgctttcttattgtttaaagtcgctataaaatggggatataactacatagtttggaggtatcaaaatggtagatgtagcatttgtctgtcttggcaatatatgtcgttctccaatggcagaagcaatcatgcgacaaagacttaaagacagaaatattcatgatataaaagtacattcaagaggtactggtagctggaatttaggagagccgcctcatgaaggtacacaaaaaattctcaacaaacacaatattccatttgatggcatgattagtgaattattcgaagcgacagatgattttgattacattgtggctatggatcaaagtaacgttgataatattaaatctatcaatcctaatcttaagggacaattgttcaaactgttagaatttagtaatatggaagagagtgatgtaccagatccatactacacgaataattttgaaggtgtatacgacatggtattatcatcttgtgataatttaatagactacatcgtaaaagatgcaaatttgaaagaggggtagttttttatggaaaataaatttgttcctggtattttaattggtgccgtaattggtggcgcaattagtttagctgataaatctacacgtcaagctttagttcaatcagttaaagatgcaaaaaatggtaaccgcactcgtaagccttctaaagtcagcaagattaaagacgaagttttatactggaaagatgttgttgaagaaattcgtcgtaataatcctgaattagaacgttcattaaaggatgcgaaagaaacatttgttaatagaaaaaatcaacgctaagatgattttgtttttataaggcaatacttaacaatttggtgtacgcctttcatagttatcattattaaatgataatacaatgattggccaaactgcattgtttcagtattgcctttgttttaattttaaatcaaaatagcctatgaaagatttaaatcaattaatttctataatattatcatttttaaagcatatcattgtttagtttttttataattggataaatactaatagttactttataaaacattacatagagaaaggttaaggagtgcacatgtcgaaaaaggatcactcttcttcaaaataccttaattctgttaaggaaacgcaagaggagtcaaaaaagaaaaataaaagtaatcccaaaattgatgttgatcgtacatatattgaacctcaacaattccaatctaagaaacctaaaaaagaggatcaggttttcttcttatcaagattaaataaacctgcaaaatataagaaagactctaatttcttatcatatctcatctatcgcataggaaaagatgatgcctcaggactagcagcgcaaatgacttaccatttcgtacttgctatgttccctatgttgcttttcctattaacattattaccatttttcaatattaagcagagtcaaattactaatatgttaagtaatgcacccgctgaaacatctactctaattaagagtgtaattggtgatataactcaaaactccagtggtggcttattatctatcggtttgattttagcaatttggtcagcttcaaatggaatgactgcaattatgaattctttcaatgttgcttacgatgtagaagatagccgtaatggaatcgtattaaaactactaagtgttgtcttcactgtagttatgggcgttgtgtttgtagttgctctagcattaccaacgcttggttctgtaattagtcatttcctattcggtccacttggatttgacgaacaagtgaaatggatttttaatcttattagaattgtgttaccaatcattattatatttatcgtatttatcgtgttatattcggttgcacctaacgttaaaacgaagcttaagtcagtattaccaggagcagtatttacttcaattatttggttagctggttcatttggttttggttggtatatttcaaattttggtaactattctaaaacatatggcagtatcgcgggtatcatcattttgttactatggttatatatcacaagttttattataattgtcggtgctgaaatcaatgcaatcattcatcagcgtagtgtaattaaaggtaaaacacctgaagaagcagcattagaacatgatgacaataataaaaatcattataatgagaacactaggtatgaatatgatgaagatactaatgcaacacatcaacgtacgtatcatgttgatgaacatcctagtgatacctatccagaagatgataaaaatataaaagacaaaatcgttgataagcttaaaaaagactaaacaacaataaaacagaggttttcgctaatgattgcgaagacctctgttttttggtgtctatttgatgttatattgtgattggcgtcagtaacttttcttaattcgatatgaactattgaattaaattatgttggaatgcatagattacagcttgtgttctatcttgcacttctaacttacttaaaatgttactcacatgtgtcttaaccgttttaatagtaatatgcgatgcactagcaatttcttgatttgagtaacctttcgcaatcaataataatatttccatttctcgttctgtaagcatttcatataactctgcgcgctttttcatacggttacgcattttcactaaaacttccggttcaaaaacagattctcctctagaagttttacgaactgcatcggcgatatcttttgcacttgttgtttttaaaatgtaactatcgacacctgcatctaatgcacgatatacctctttatcttcaataaaactagttaacattaatactttaatttgcggtaaatcttttttaatctgagtcgtcgcttctacaccatccatgtcatccataagtaaatccattaaaattaaatctggcttcaactcatgggctttggcaattgcttctttaccagaagcgccttcaccaactacttcaatatcactttgcgttgatagataacttgaaattcctatacgtaccatttcatgatcatccacaaacaatactttaatcgtcatacgaatcctccttatttaaaggtgctttcacctcgatacgtgtacctgaatctggcaatgatacaatatggaacgttgcaccaatttccaaagctctttcacgcatatttttaagtccataactttgttctaatttttcatcaacattaaaacctttaccattgtcttgaattctcaacaataaataatcgtctttattaaacaattctactgtcacttttgtaccgtttgaatgacgcaatgtattcgaaattgcttcctgtgtaattctgaacaaatgatcttcaatacctttaggcactttaaaatcttgtatttcatgcacaactttcattggcacttttttttgtaaatcaataactaaatctttaataccctcacctaaagatttgtcttttaaaccaagcggtcttaaatgtaacagcaaagcacgcatttctaactgcgaatcttgaaccattttctctaaaatcggaatttgttggtctaatggtggttctaacttcgtttctttgatagcagatagcatcatacttgccgcaaaaagttgctgactaacagaatcgtgaagttctcgtgctagtctttgacgttcatcttcaataatctttttaactttcacatcattaatattataattttcattggttaagttttgagttttaagtcgcaacttatgcaattcttgatttaaaggtacgagtgtatggtataaatctaacgtttcactatatatttctatattttgatcattaatgccaactgtttcgccttccattgaacgctcaatttgcgtcttaatccaatcattttgctgattgattttgtaagcgagtaccgaaccaacaataatacacaataaaatgatgatgagatttaaaaataaaaagactggtattccgaatatttgtgtataaaacataccttgaaaatagatgatatttacaaaaactttatcgatgaacagaaatgcagctagcatgctatatactaagatgagcattgaaccaattgttctaatgtagtggttcatcgataaatcacctctacgtctccgataaacgttgatacgtagatattaactgtgtagttatccggtttcatcatttcttcaatatgaatattgttattttcaactttatatgatttttcattcacgtaagtgcttccataaaaagcagctacatgtaaattaatattgtaattaaccggcaatataacctgcactttacctaaaatgtgtctaacaacaatggtattattttccttaatatttgcagcttttgttaagtcaatatgtaggtcgccaattccatgttgaatttgcacatcttcccacttatatacataaactggtgtacgttgctcaccaaaccacttttgtttaataaaagatggtgaagtcataacctcatccgtcgcaactactttttttggtttaaacttgtgtattaaataacgcacaataagtagtaataaaaagacgaacaagatgatgattgtatacttattagacaataatgtgaatgcaattaatagcgcgcctatccaaaacgccaaaaggccacgtattttatgaaaataaagatatcctacataaactaatacacatcccaataatagaacgagtaaaaagccaattttttcaaaaaatatgtagtaaaaattggcaataatcattaatgcagtaaaaatgatcaacatttgcgttgatatatatttgtgtgtcatgtttcgccgcctttctatgccacagcgttcatataatttattagatacgatgttttttctgtttctattttttcagttgaagtttgttgaatttgagtttcaatttgtgcataatatgcttcaactttattcaactctgatttaatattttcaatttcttgattattgatttctcttgcacattgaatttgaaatgcttcagcaatatcaatatatttattttctaatgttagcattagactgtcaattaacttgctaagttgttcttttttagtaattaaataacgcatatagtcatctaaatttttcattttttcatctaacattaaaaggtagtgcttgatattatttcttactgttgctctcaaaaactgttcaatataacgttcaacatagttcataactatcaccttttataataagttttaaaataccaaatgcgctatgtatcttcgttgatgtcgatgatatgtttgcttaaaaactactttattacaacatatttttgaaatgacgcattgattgtgttcttaattattataaaacagttccgaaaccaatatgaataggctccggaactaaatgatgttcatactttagtcttagtatatgttgaactattcttcttcaatctttgtcgttaaaatcggaccatccttagtcacgataaccgtatgctcaatttgagcgacaaaacttttatcgctcgtttcaaaagcccattcatttttaccttctgtaacaaatgatgcatttgatgagataaacggttcaatagctaataccataccttcagttaataatgttttatcttttggatcaaagtaattaagtacatgtgctggcgcttcatgtaatgataaaccaacaccatgacctgttaagtttttaatgactttcaaatcattttgtctagctgtattatgcaccgctttaccaatgttacttaacttagtacccggttttacttttgcaattgcattctcaaatgccatcgttgctacgtcacatactttttgtttcattggatcgtctgattctccaacgacaaatgaaatgcctgtatctgcataatagccattcttcaatgccgatacatcaatatttactaaatctccttcacgaatgacacgcttacttggaatcccatgtgccacctcttcattcacactaatacacgtttgaccaggaaaattttcatcatgaattggcgcagaaatagcaccgtattcttcaaataactctttcgcaatattatcaagctctttcgtagtgatacctggtttggttgcagcttgcattgtattgcgcactttagcgcatatgtatccaatttcttttaacgcttgtaattcttcttctgtttttacaatcattttatcccgttccttttttatataattataacttattatagcaaaaattctttgatatactaaagatgttactttagtattttggaaagtgagtgggacattgtgtgataaagaaaaaatatttctttatcgtccccaacttgcattgtctgtagaatattctctatgttgggaccctccccaacttgcattgtctgtagaaattggtgttccaaattctctatgttggggccccgccaacttgcattgtctgcagaaattggtgttccaatttctctatgttggggcccacaccccaacttgcacattatcgtaagctgacttttcgtcagcttctgtgttggcgccccggactagaattgaaaaatgcttgttacaagtgcattttatttcagtcaactactaacaatataacattgtggagcccagagctttgattaatgtatatgaaaatcaaagtaatgcctaagcatgattatttcaaatgttttacatacatgaacttttccactgtacgatactattattataaagcgctcgctaagattttacgatgattagaggttaaaaaatgaacgatcaatggtataaacatttaattggtgccagaacaattaaaactggtattgccatttttttaacagctgtcttttgtatggcactagatttaactcccatctatgccattttaacagctgtagtcacaattgaaccaactgccaaggcatcacttattaaaggttatcgtagattacctgctacagtaattggtgcaggctttgcagtattatttacatatttattcggcgatcaatcaccttttacatatgcattgagtgcgacgttcacgattttattctgtacaaaactcaaattgcaagttggtacgaatgttgctgtactaacatcattagctatgattccgggtattcatgatgcctacatattcaactttttgtctcgaacattgacggcgattattggactcgtgacatcaggtttaattaacttcatggtgttcccacctaagtattatggtcaagttgaagaaaaattaagtaagacagatgccttgatgtataaattattttacaatcgctgccaagaacttattttatcaagactgcaatctgataaaagcgaaaaagcatataaaaatattttcaatttaaacaatcaagttgaaacgttaataagttatcaacgtgacgaattaagctatcataagaaaaaagaatgtgattggaaattactcaaccaattaactaaacgtgcatatacgaatcgtttatttatcactcatttatcaaatatcatttacttgcctaaaaatactcgtgttaacttttcaggtgacgaaaaaatggcattactaaaaattagtagtagcatcaaagatatattttatgatggttcatttaagagagaagatgattctgtagaaactttacgttcgacaataaaagcacttgaaattagtggtgaaaatcaaattaaaagtcatatactatacgaagttctaatgatttatcgactgctagacagcagatatgcttaatttaagcaccttatgctaattggcaccattagatatattattcttactttatcagtaactttatcgtatatagcatgtcccttttaaaaattacaagcataaatattcagactcaaatatagccacacacctaaactacggagggatgtggctgtcttttttgattgtaattatgtatcagatttaaatcattaatgtaacgaggctaattcattaataaatttagtaaaatctgatttagtaacatttatccttaatgaaataccagattctgttgccatgtttgaatgccttaaaccagaatcaaaatcaatataaatacaaagcagttcttgattaaaatcaataatcataaaatgtaaatcaggttctataaaatatatttcggtaactggattatcgtattccatatgttttaaattgtccatgtcactatcaaaaagtgcaaattcaaatttaatttcttgatcttcgaaagttgcactagtgtcgaaataaaaaattttattatcttcttcgataactacatcttttaaaataaatgttatcgatgttttactatgtacataagatgcatctcttaaaatcactttagtaggcttcatcgtcaaattcctttcatcattcattttttcatgttgcataatcaccattactattgataattctaggatagatactcattgtataataattattcactagaacaaaaacacacacacattattttggttgtttccatccaaaataatgtgtgtgtttatacatatatgattaattactaaacttcatcgtttatcaattttaaatccattgatgcgatgttcagagttaacgagatttcttctgtctatttgctctgtctattaatacttgtttcgcttgcttttccgcttcattatctatttctttaggctcaaacggaatacccttacgttcacaagctttttctaacagataatcagtgatttcgtaatttttaggtaaaattggtccgtgtaaataagtacctaataaatttttataatgaatgccttcttttttatcttcatcattattaccataaccaaaagtaacatgaccaagtgtaccgaaattatgatatgttctaccaccgtgattttcaaaacctacaatagttccaaaagtatcactttcgataacaatatctcctgttaatcggtttgtctttgattcagtataaaagtctaaaatacctaacccttctaattctgtaccatcaggcgtgatatatttttttcctaaaaattgatagcctccacaaatcgttaatcccggcataccatcttcaatcgcttctttaagtggtgtcttaattttacttaattcttttgttgctaatgcttgttctctatcacttccaccaccgataaagaaaatatcacattcatcaaaggtaataccttctgtttcattgatttctacgacattaactttaatatttcgtttttttgcacgttgtcttaaagcaataatatttcctatatcactgtataaattcaatttatctgacataaaatgataaatagtcaattcatgcatattatgattggcctccttcaaacgaacggtttaattgttcaagcataggcgctaatgatgtatagtttggtattgcaactgtaaaacctttataatccatagtctttgccgttgctttataaatatcacgctcaactataattggtacttcaacctctgctaacttcaatcgcaattgaagttcttctgctcgtgtacctgtcacgatgatagcttcaatttgttgcttagataatttttcaaaatctgcatcataaatccatgaagtatctcgaccatctgcagcgttatcatttagcgaaataacatacactttttcgccctctaattgttcaccaactgataaacttgcattcattcctgcagggtttttagctaaattaatcatcgcttcttttcgttcttttttaaagtactgcatacgaccattgtctgatgtatacgtttcaaagccatttttaattgcttgttcatttaaccctagctctcttaaaactgtatatgctgctaacgcgttataagcgttaaagtcacctgcaattttcatatcatatttttcatcattgatatttaaatgtaaaaacggtgccacatcaaaacttgatatttcatattttgcttgctctcgtttgaaaccacactgacagtgataatgaccaatttgattataatgaatataatcgtattgcaataagcgaccacagtttggacaatatctactttcattcatcgtactttgctcaaattcatgtgcatgtgctttcataccatagtacacaatcgtatcacttgcgattttcaaacgactcacaaatggatcatcagcatttagcaataatttgatgcctttattactaattgtctctgcaatgttgttaaccataatatcaatttcaccgaagcgatccatttgatctctaaagaaattagtaaataccatcattgaaggtgtaacttcttttaacacacgtggaatcgaaccttcatcaatttcgattaccgcaattttagtcttaggtgttgattgcatgatgaatgcagaagttatacctgcagccatattagcaccttcattattgtgtataatttgaatattatttgcttgtaaagtatgtccaattaagtttgaagtcgttgttttaccatttgttccactgataaatacaatatcatcaacttgctctgctaattttcttaatatatctgtatccacttttctagcgatttgtccaggtaaatctgttcctcttttacctactgctctacttgctttacgcgccaatttcgctagatggattgccgtccactgtctcatgtgtttcctcctcaaatttccactcgcatcattataacatgacaaggcaacttcaaaaaagtttctcaatcacaaattgatacagtgtttctaaattataatcattctcatttagataattaaaaatgatatttattctcaattaaatctcgctaaatgatacattttctcaattagaacgctgaaaccaggcattaaattataattattattatttacaattgagaatgagtttgttatactaagtttaattcatagtaattttaatttacaaataagaggtgtatcaaaatgttaagtaaaaatttattagaagcattaaatgatcaaatgaaccatgagtactttgcagcacatgcatatatggcaatggcagcatactgtgataaagaatcgtacgaaggatttgcaaacttcttcattcaacaagctaaagaagaacgtttccatggacaaaagatttataactatattaacgacagaggtgcacatgcagaattcagagcagtttcagcaccaaaaattgacttttcaagcatactagaaactttcaaagacagcttatctcaagaacaagaagtaacaagacgtttctataacttatctgaaatcgctcgtcaagataaagattatgcaactatctcattcttaaactggttcttagatgaacaagtcgaagaagaatcaatgtttgaaactcacatcaattatttaactcgtatcggcgatgacagcaatgcattatatctttacgaaaaagaacttggcgctcgtacattcgacgaagaataattaaacatcactacaatagacagataaatatcatacgacatgatagacatttgggtcacatacaataacccaatgtctatattattttgctttacggagatcactagattcattttctgaatcattgatctgcgttttttcattttcaaggctaattattgtatttttagtcatttattttttaaactactaatgttaataactctaaatttaatgttgaattaatttgaccgattttaaagcatatcatcatttactttttaatcagagttacatccaaatgatagatttcacgttataccttcacgtataatattatgtatcgtttgtaagcaaatgactaaaaagtctattaatatatacatttaattaattgaaaggattgactacatgatacaagatgcgtttgttgcacttgattttgaaacagcaaatggtaaacgtacaagtatttgttctgtcggaatggttaaagtcattgatagtcaaataacagaaacatttcatactcttgtgaatcctcaagactatttttcacaacaaaatattaaagttcatggcatacaaccagaagatgttgaaaatgcacctacgtttgactacgtatttccatatatgatgcaatttattgcagatttacctgttgtcgcacataacgcggcatttgatatgaacgtcttacatcaaagcattcaaaatattggtttaccaactccaaatttaacttacttttgtagttatcaacttgctaaaagaaccgttgattcgtatcgatacggtttaaaacatatgatggagttttatcaattagattttcatggtcatcatgatgcattgaatgatgccaaagcatgcgcaatgattacttttaggctactgaaaaattatgaaaatttaacatatgtaactaatatttatggtaaaaatctaaaagataaaggctaggactaaataaaatactcccttcaaagtaagcattgtaaaaatgtaaactttgcagggagctttattttatataaagtcatatatcgtcatatttttataagtcgattgttctaaattacctacagtgacaccaataagtcgaattggtacgtcagggtcttttaaatcgttataaagtaaatatgcaatattataaatatcttcttcagaactaaccgaatctcttaaactcatctgtttagataacgtttcaaattgataagttttaattttaaccgttacagttttagctgacttctgtaatttatttagacgttcagctgttttacctgacaactcccatacttttcttaaaatctcttcatcatcattcacgtctgttgcaaatgtgcgttctgtccctactgattttcttactcttgatgatttcacttcactatggtcaataccgcgtgccttgttatataaaccccgacctctttttccaaacaaacgtattaattcaaattccgttttctcatataaatctctaccgttaaaaataccattatcatgcattacttttttggaagctttacctacgcctggaaaatctccaatatccaatgtcatcaaaatatcatggacattttgataatcaatcacagtcataccatcaggtttattcataccactcgctaatttagctaaaaatttgttataagaaacacctgcagatgctgttaaatgtgtctgctctagaatatcttttctaatatactgagcaattttcgaagcaggaaggtctggtctcactaattctgtaatatctaaatacgcttcatccaatgacatcggttctactttgtctgtataacttcggaaaatagacataatctgcgcagatgtttctcggtaagcaccaaaattacttgtgacaaagtatccatttggacataatttatgcgcttgtgacataggcattgctgaatggacgccgtattttcgtgcttcataagatgccgtagagacaacacccctactacttgctttaccaccaacaatgactggtttccctttcaatttggggttatctctcatttcgacttgtgcaaaaaaatagtccatatctatatgaataattcgtctctcagtcaagtgctcacctccctctaatttttacttttataacgcacaaaaatatctcaacataattatacgctgtgtacgatttttttacataaatcttgcacttagcgataactatattgagataactacaagttgttataaaatcaattgctatttaagcatgatgatgaagacgattgagtaagaaaacataggtaatctgaaataattcaagcaaattcattttgttggtatcatcatatttaaatttattattgagtcggcttttgatgatacaaataaatactatcttcatcttgttgaacatatttaaaactactagatattgttaatgcaacaagcaaaatatctataaagcaataagcggtatgcatactaaacataaaaataagtgatgaataaccaaataccttaattaaaataagcaagccagtacttaataggattagtggtgacagcataataattgagaattgccatttgttgaagcaagcatctgctgtttggaataagattctgtctttttttatattaaacataggtttgctatcttttttaaataaaagaaataatgctctatggataagttcatgtaaaatcaataaaataatgaatccagcaaacccatatacaagattgatgatgatattttgatcgacaaccgctgtgacacctaacgcccacttatacgtaaataaaatcacgaataacgcaataacaagttgcaagataataaaccttcgcatttgaaaattatttgtcgttaaatcaattttatgcattgccaaccctcctgatcatgacattcttattcttctttaaatatagtatacaatgtcacatttaatttaaaaagttcatatcaagaaagtaaattggctgtaataaaattttaatatacgacttctttcttcacttaataaggcgaaattttatctcaaatcatgtgcgctatttcaaattgaataatgcaactgtctcaacatgtgttgtttgtggaaacatatctaccggtgttacctcttcaagttgatatttttcagctaataataatgcatcacgttgctgtgttgcgggattacatgaaatatagacaatacgcttaggttctaatgtaagcaaagtctgaataaacgtttcgtcacagccctttcttggcggatcaaccattacaacatctggtttaatcccttgtgccttccattgtaaaataacttcttcagctttcccacagacaaaagttgtattattgcattggtttatagtcgcattttgttgtgcgtcttcaattgcagaaggtactacttcaacaccgtatacatgttttgcatgtggtgccatatatagccctattgttccaataccacaataggtatctaatacaacttcattacctgtcaattgcgcatactcaattgctttattatataatttctctgtttgttcagaattaatttggtagaatgactgatcacttattttaaatgtactatctgttaattgatcaataattgtatctttaccatatagcgttatagactgacgtcccataataacattagagtggctatcattaatgttttgtttaatgcttgtcacattaggaaatgcatctaatatcttctcaacaacagcatttttttgtgaccactttttaccattagttacaaaaataatcatcatttcgtctgtatgatatcctgttcttacaaccaaatgtctcattaaaccttttttcaattgttcttgataaatacttacatttaaatcttttaaaatagatttaacttcattcatcacttcttgatgttgtgaatcttgtattaaacaactttccatgtcaataatgtcatggcttctttgacgataaaagcccataataacttcattctgttcattcttaccaactggaatctgggacttgtttcgatatctccaaggatctgtcatgccaactgtatcgttaatcttagaattatcaaaatgcgcttttcgctgaaacaaattaatcacttgttcctttttcatttcaagttgtgcttcgtatgataagtgttgaagttggcacccaccacaacgttcataatatatacatggcggtgcaacacgattctcacttctcgtatttatattaagcaacttacctatcgcaaagttcttttttactttgataattttatattcaatttgttcattaattaaagcttgtggtatgaaaataggaaagcgatctatttttacgacaccatggccttcatgcgttaaatcaacaactgttcccgttttaatgtcatttttagctattgcttgcaaaattttacctccaaaaggaacaggttaggaacaaaattatgcgcttcctaacctgccattatatatttcactacttctgtttattcttcgattaaattgtcatcaacatgatcattatttattaactcttcatttacaatatcattaggtgcaaagacatctatatgacgttctagattcaagaaattcgctggtaatttaccaccatattctccatctacatttagttgtaagtctgtgaatgatgaaatattaattgcctttgctttttcataaataactttaggatgcttagtatgttctcctcttgaagctaaagtcataatatgaccaagttctgcaaggtttgatttttcaactataattaacgtaaaatagccgtcatctaacttagcgtccggcactaatttttcaaatcctgccattgaatttgttaaacctaaaaagaataataatgcttctccttggaaaacattaccatcatattcaattcttaaatctacagctttcatttgaggtaacatttcgaaacctttgatgtaataagcaaatggaccaacaatagatttcaatttactcggtgtttcataagagacctgcgtcaattgtccgcctgcagctaaattaataaagtatcgattattcattttaccaatatctactttagtagaatgaccttcaatgatgacatcaagtgcccccatgatgtcattaggtatatgcaatgcacgtccaaagtcattaacagtacccataggaatgacacctagcttaggacgattaggcttttctgcgataccattaactacttcatttaatgttccgtcaccacctgcagcgattaatacatcataattttcatgcatagctctttctgcttcaagtgtggcatcaccgattttctcggttgcatatgcactcgtttcatatcccgctttttctaattttattaaggcatcaggtaattctcttttaaattgctctttacctgatgtcgggttataaatgattctagcacgtttcctcatatcttatccctctacttaaaattcatatattttaacttcatcttggtttcgtctaatagggagtgggacagaaataatatttaacaaaaattatttcgttctaccccaacttgcattgtctgtagaatttccttttgaaattctctttgttgagggccccaccccaacttacacattattgtaagctgacagaaagtcagcttctatgttggggccccgccaacttgcattgtttgctgaaattgggaatccaacttctctatgttggggcccaccccaacttgcattgtctgtagaattccctttcgaaattctctttgttggggccccactagaattgaaaaaagcttgttacaagcgtattttctttcagtcaactactgccaatataacattgtagtgcctaggacattgaatttatgacccaggctcagtcttatttcatcattcttaatatcgttaaagaccaacttgtatctcaaacaaatactatctcaatatgtacaaaggttgttatttattcagcatttttgccgttcttcattatatagacttcgtcaattatgctattttacctttaaaatgatgttgtaaatataatgttgtctttatacaaaaatgttttatacctctttattatacagtttgccttaatataattaaagctaacgcattaataaaattaatatttttaccaataacatgtacaatgaataaagttaaatgtaatatgacttctatagatataaataaaccctcgattgcatctaagtcagcaaccaagggttcagtgttatatcatcatagtctgaggattaaaattatcttttatctaattcttgttttaatagttgatttactaattgtggattagcttgacctttagacgctttcataatttgaccaactaagaagcccatagctttgcctttaccatttttgtaatcttcaactgattgttcattattgtctaatgcttcatttacaaattttagaagtgttgcttcatcagaaatttgaactaagccattatcttccataatctgtttagcattaccacctttagctgctaactctgggaagactttcttcgcaattttactgctcattgttccgtcttcgataagtttaatcatacctgctaaattttctggtgttaatttagtatctaataattctacttgatttttatttaaatattcgtttacgccacccattaaccagttagatgttaatttaacatctgcaccgtgttcaattgttgattcaaagaaatctgacatttctttagtcaatgttaatacgtgtgcatcgtatgcaggtaaacctaattcatttacatacttagctttacgctcatctggtaattcaggaattgtctgacgaacacgctctttccaagcatcatcaatatataaaggtacaatgtcaggctctgggaagtaacggtaatcatcagaaccttctttaacacgcattaaaattgttttacctgtagattcatcaaatcgacgtgtttcttgtccgatttctccaccatttaacaattcttcttcttggcgtttttcttcatattctaaacctttacgtacatagttaaatgagtttaagtttttcaattcggctttagtaccaaatttttcttgaccatatggacgcaaagagatgttagcatcacaacgtaaagatccttcttccatcttaacgtctgatacaccagtgtattgaataattgaacgtaatttttctaaatatgcatatgcttctttaggtgaacgaatatctggttcagatacgatttcaattagcggtgtaccttgacggttcaagtcaactaatgaatactcacctttatgtgttgacttaccagcatcttcttccatgtgaagacgagtaataccaattcgttttgtttcaccgtcgacttcgatatcgatatatccattttcaccaattggttgatcaaattgagaaatttgatatgcctttggattatctggatagaaatagttcttacggtcaaacttagattctgttgcgatttccatatttagtgccattgcagcacgcattgcccagtctactgcacgcttattaacaactggtaagacacctggatatgctaagtcgataacatttgtatttgagttaggttctgctccaaaatgcgctggtgatggagaaaacatttttgagtccgtttttaactctacgtgaacttcaagtcctataactgtttcaaaatgcatgatttccactccttataatttttcataaacgtcatgtaaattgtattgtgtttcatattgataagcgacacgatataacgttttttcatcgaatggtttaccaatgaactgtaaaccgattggtcggccatttgattgtccacaaggaacagaaataccaggtaatccagctaagtttactggtgttgttaataaatcattggcatacattgttaatggatcatcaatttcttcacctaaattaaacgcagttgtaggcgctgttggaccaactactacatcataattttcgaatactttatcaaagtcatttttaatcaatgttctaactttttgagattttttatagtaagcatcgtagtaacctgaacttaatgcaaatgtacctaagaaaatacgacgttttacttctttaccgaaaccttcagatcttgacattttatataattcttctaatgaatgagcttctttagaatgataaccataacgaattccgtcaaaacgagaaaggtttgacgaagcttctgatgatgcaatcacgtaatatgatggaataccaaatttagtatttggcaatgatacttcctcaacgacagcacctaaagattttaaagtttctacagcgttttgaactgcttcttttacgtcatcagctacaccttcacctaagtattctttaggtaatgcaacttttaatcctttaatatctttaccaatttcagatgtaaagtctacatcatcaacaggtgcacttgtagagtcattaacatctgcaccagaaatagcttctaatacgattgcattatcttttacatttcgagtcaatggaccaatttggtctaatgaagatgcaaaagcaactaatccaaatcgagatacacgaccgtatgttggtttcataccgacaacgccacaatatgcagccggttgtctaattgaaccacctgtgtctgaacctaagctaaatggtactaagccagctgcaactgctgctgcagatccacctgatgaaccacctggtactgctttatggtcaaatgggttaactgtttttttgaaataagatgtttctgttgaaccacccattgcaaactcatccatatttaatttaccaattaaaacggcattctcattatgtagtttttccattacagtagattcgtaaattggcacaaatccttctaacattttacttgcacatgttgtttctaatccgtttgtaataatgttatcttttatacccattggaataccaaataatttgccatccatttggtcttttgcttgtaattcatccaattcttgcgcttttttaattgcattttctttatccagcgctagaaaagacttaattgttggatcagtctcttcaattgcatcatatatatctttaacaacatcagatggtttgatttttttgtcttttattaaagttaataaattctcaaccgattcgtagcgaatgctcatcttacgcgtcctcctcattcatgattgtaggcactttaaattgtccatcttctgtttctttggcatttttcaaagctaattcttgcggaatacctttaattgctttatcttcacgtaaaacgttttgtaaatctaaaacgtgatatgtaggttcaacgccttctgtatcagcgctatcattttgttttgcaaaatctaaaatgctttctaatgtgttggccatttcttccgtttcttcaggagaaatttgaagtcttgcaagattcgcgatatgctcaacttcttcacgtgttacttttgtcattaataaaagcctcctttaagtcattcatcactaaattgtatcaaatttccaattaaaaatctaagtatttatgaggtgctactttaatttcatataaactgtataaacattatcattcgtttaccaaattattttttatgaaaacaacaccctttaatattagacaacccaattcaatattatgattatgcaattttaattataaaaatttgcccatatccaaaaaatacgaaagcgctttctatattggtatacaagtatttcaaaaagaataaatttaattttcctacttttctaaacatttatctttatgtataatgttttcaagtaactaaattataaattaaataaagggagtgtttatcatgcttacaatggggacagcattaagtcaacaagtagatgccaattggcaaacttatattatgattgccgtctacttcttgatactaatcgttattggcttttacggttacaagcaagcaactggtaacttaagcgagtacatgttaggtggacgtagtattggaccgtatattactgcattatcagctggagcttcagatatgagtggatggatgattatgggtctacctggttctgtctatagcactggtctatcagctatgtggattacaatcggtttaacattaggtgcttatataaattactttgttgttgctcctagacttcgtgtttataccgaattagctggagatgcaattacattaccagatttctttaaaaatcgtttaaacgataaaaataatgtgttaaagattatttctggattgattatcgtagtattctttacattatatacacattctggtttcgtatctggtggtaaattatttgaaagtgcttttggattagattatcatttcggtttaatattagttgctttcattgtcattttctatactttctttggtggatatttagctgtatcaattacagatttcttccaaggtgtcattatgttaattgcgatggttatggtccctattgttgctatgatgaatttaaacggctggggaacgtttcatgatgtagcagctatgaaacctacaaatttaaatttatttaaagggttatcatttataggaattatctctctattttcatggggattaggttatttcggtcaacctcatatcattgtaaggtttatgtctattaaatcacacaagatgctacctaaagctagacgtttaggtattagctggatggcagttggtttattaggcgctgtggctgttggtttaacaggtattgcattcgtacctgcttatcatattaaactagaagatcctgagacattattcatcgtgatgagtcaagtactcttccatcctcttgtaggtggtttcttacttgctgcgattctagctgcaattatgagcacgatttcttcacaattacttgtaacatctagttcattaacggaagacttttataaattaattcgtggtgaagaaaaagctaaaacgcaccaaaaagaatttgttatgattggaagattatctgtattagttgtagcaattgttgccatcgcgattgcatggaatccaaacgacacaattctaaacttagtcggtaatgcttgggccggatttggtgcatcgttcagtccacttgtgctatttgcactttactggaaaggtttgacacgtgccggtgctgtaagtggaatggtttcaggtgccttagtcgttatcgtttggattgcgtggattaaaccattggcacatatcaacgaaatattcggcttatatgaaattattcctggatttattgtaagtgtaatcgttacatatgttgtaagtaaacttactaaaaaacctggtgcatttgttgaaactgacttaaacaaagttcgtgacatcgttagagaaaaataaaattttatgtcatatctcgtgcatgaatgaaatattaaatgcaccctaataatcgattgttgaaataacctgaaagttatttctcaatcgatttttctatgttaaagtttaattttttaattgctattccattaaaaatgtatcatctaatttagaagctatttatcaccatacatccgaccgtatttctccatcaaatcaattaagggcaagatatctttacctttgtcagtcaaactatatataactttaggcggaacttctgcatatacttctctatttaaaataccatctgattctaattctttaagctgttttgttagtgatccttgagatatatttgcgaaaaatttcttaatttcaccaaatcgttttccctctgtttttaagtaccaaataattagatttttatatcttccagataacacattttgtgtgtatgcaatgctatatagatttctatgttcttcaataaaattttcatcaaatccatcgttacatattttaaccatttagctctacctctccacattagtatgattgttagtacttagttaattatttttgcctacttccctatttatatcatatatactaacgtattttatatatttcgattataaaaggagggtaatcatggaaaatagagtttctaaaattttaaatatagagaaaccgattattcaaggaccaatgaatggattaaccaatgcaaattttgtagcatcagttagtgaagcaggtggtttaggcattttaggtccaaatgcaggcgaagcaagaattacgaattcaccatttgaaaccgcagaaaaaatgagattggaggtaaagaaagttaaaaaattaacgagtaaaccattcgcctcaacaattatggtaagcgaagatttatcatatacttcttatcttatcgacatgcttatagaagaaaatatatctgccgtcttaattaacggcatattagatcaaactatctttaataaacttaaagaaaataatattaaaataatattcagaccactaacacctacaattgaaaatgccattaaatctgaagagttaggagcagatgtttttgttgctacaggttttgatgaaggcggtacagttccagaaaaaattatcggtactttttcgattattcccatgattgctgatgcaataaaaattcctgtaatcgctgcgggaggtatcggtgacgtacgaggagttagagctgctttttgtctaggagctgagggcgtattcgttggaagtgttttaatcccaacttttgaaaacccagctgcggaaaatgttaaacaatatattgtcgattcaaatgctgaagatttaatcttatttcgaactattccatcctattatcgttcactacctggaaaactagctagagaattagaagaaatggataaaaatggagcaactaatgaagaattagcaaaacatatgggtggtggtcgaaatatgcgtcttggaatgttaaacggagatacagaaaatgggtatgtttctgtaggtactggtatcagtccaataaattctataagaagcactaaatcagtaattgatgacttgatgcaagatttcaactagttaataataaacgaacgtatttatatttatccatgactactttatttaataaacgatgaatataatcatgggtctgtgacagcattcaatgacatgctccattcaaagtaaactttaaagaaatcattttataaatatgccaggcacttttatggatttatgtcctaatctcatcgattttatcatttaaccacatttaaaactttaacaaattaaaaaggtactaatgttaatcaaaattctgactaacattggtacctttttattatctttaatttacaattaattactgtatatatgaacttgcggttctttgtcatcttttgtcttactaattaaagcacgtggttgattaccatctttaatacgaatttcatagttatcgattttatcgaaatatttattcgcttgttcagtaacgtactgtgtaataccaattgtttcagcttgtccatagtaatcgattggtaaatctactactaatcgttgtggctttttatcaataaatttaactttccctactgcttgtgtgaaattagaaaaatatgattgcaaattatcgttaaattgcttgaaattattatttaaattttcatcataatctgctgctgttgaagaaggtaataaagctgatttttcattgatattatgccattcattaagctttgtttgactcttttctgcagtcgcttgagtgataaattcacctggtgtgattgaatcttcacttgattgcttataaattgcaaaatgaattggtatatcttttaaatcatcattttcacgtaaccttgataatatctcactagccatttgtttaccttgctttttaacttcgctatcatctagttttttactaaaagtcggtccatctttttcttttttatagtaataaacactattcatagctaaaccaatcgtcatacctttaatattcttaccttttgtatctccaccaccataaaaatcttgctctaaaatgttagataaataggctggtgacttttctgcaatcttttcaggatctgtttcaccttcgtgtgatggattaagtcctaaattttcattcgctttcttgtcttttttatctttttcagacattttatcgatttcacgttttgtatacttaggatttaaataggcattaattgttttcttatccaaaaattgaccatcttgatacaaatatttgtctgttggaaacacttctttacttaagttcaacaaaccatcttcaaagtcgccgccattataactatttgccatgttatcttgtaaaagtcctcttgcctggctttctttaaatggtaacaatgtacgatagttatcaccttgtacatttttatccgtagcaatttcttttacttgatttgaactattgttatgtttttgattatcttttccagcctggtcatccttatggttaccacaagcagcgagtataaagatagctgtaatcaataatactaatgtacgcttcatcgacatacccctctaactatttaattcattttgcttatctacaaattgttgctctgtccaaatttcaatacctaaactttgtgcttttgttaattttgaacctgcatcttcaccagcaataacgacatctgtatttttagtaacgctacttgtaactttagcaccttgtgatgcaagccatttagatgcttcattgcgtgtcatttgatgtagcttaccagttagtactatcgttttaccactaaattcaggatgtccttcaatatctgatgttttgatacctttataaatcatattaacatgtttatcttttaatttttgaattaaagcacgaatatcttcattttctaaataagtaactacagattgtgctactttatcacctatatcatgaatttctactaattccgcttcagttaccgttagtaatcgatctatcgtttcatatttttctgctaacacttggctcgctttaacacctaaatgcctaatacctagaccaaataataaattttctaaagagttgtccttagcttgttgaatggcagctaataaattatcaacttttttctgccccattctatctaaaggtaataaatcttcttctgttaaatagaaaatatcagcaacatctttaattaattcgctttgataaagctgttgaataattttagtgcctagtccatcaatattcatggcttgtcttgatacaaagtgaatcaatccttcaacaagttgtgcttggcattttggattaatgcaacgaagtgctacttcgccttcaatacgtactaattcatgtccgcaacttggacaatgggttggcatatgatatgtgacagcatcttcaggtctacgttctggaatactacgtacaacttcaggtatgatgtcacctgcttttttcactacaacactatcaccaattcgaatatctctgtcatgaattaaatcttcattgtgcaaagatgctcttgatacagttgtaccagctacttttactggttctaaaatagcagtaggtgtgactacacctgtacgtccaatacttaattcaatatctaataatttagttactacttcctcagctggaaatttataagcaatggcccatctaggagatttttgtgtgaatcccatctcatcctgttgatctaaatcattaaccttaataacaatcccatcaatatcataaggtaatgactctctttggcttgtccatttttcaatatactctaaaacaccatcgatattatttacacgcgctctatttttattcgttgtaaaacctaatttatctaactcatctaatgcttcactttgcgaacgtgcattgaaatcagtgaaatcattgacactatatataaatacgcttagctttcgttttgccgttaatttagaatctaactgtcttaatgatcccgcagcagcgtttcttggatttgcaaataactgctcatcatttttttctttttcttcatttaatcgtaaaaatgaacgtctcggcatatatgcttcaccacgaacttctacatttaatggttctttcattttcaaaggtatcgcatgaattgtttttaaattttcggtaatatcttcacctgttgttccatcaccacgtgttaaaccttgaacgaagtatccatcaacatatttcaatgatactgctaagccatcaatttttaattcgcacatatattcaacgttgccaatttgttcacgtatgcgttggtcgaattttctcaaatcatcctcattaaatgcattccctaaacttaacattggcgtgtcatggttgactttattgaaagaggcttgggcttcaccgccaactctaactgttggagaatctacagtcttatactcaggatgctcctcttctattttaatcagttcatgaagtaatttgtcatattcactatctggtacagatggattatcctctacatagtattcataactgtattgatttaataaatcatgtaactcgttcacacgagacgataaatcagccatcccttaatcctcctttttttcaattggtgcaaattgcgctaacaaacgttttggcccttgtgatttaaagataatatctagttcgattgagccatttttctcgtttacattactcaccatgccttctccccaggctttatgcatcactttgtcacctacattccaatcagatgacgatacttgttttttcgttgacgttgttcgttgactaaatccacgtttagcaaaaggttttgccttaggttgtatcgtttgtcgtttgccacttgaatgattttctaatagtgattctggaatttcctttaaaaatctagatggcatatttgactgagggcgaccaaataacattcttgatgtcgcatgagtgatatataacacctcttcagcccttgtgattgctacataacaaatacgacgttcttcttgcatttcatgatcatcttcactcttaatcgctctaatatgtgggaataaagattcttccatccccattataaagacgattggaaattcaaggcccttagccgagtgcatcgtcattagtgttacgccattttcagtatctgcctcatcaatatcagctactaacgataaatccgttaaaaagttaattaatgactgttcttctaatggggtgttttcctcatagtcttttggtactgacataaattcatcgatgttttctaatctacttcgagattctagtgtattttcacgttcaagcatttctcggtagccagacttttgtaatacttcatcaactatttcatgaatttctaaaaattcttgttcttttatcaagctttggattaactcgtaaaaattaagacactcttgtgtcaccttttttgacaatccgataaaatcagcttctccaagtgcatcaaacatactgatattgttttgaagtgcataattttgaactttttcaacagatgaaggacctacacctctttttggaacattaataatacgttgcaaactaatgtcatcattactattggcaattatacgcaaataacttaataaatctttgatttctttacggtcatagaacttttggccaccaaccattgtgtatggcatattagatttcatgaatgtttcctcaagtacacgtgattgtgcatttgttctatataaaattgccatatcttgatatttcttaccattacgttgatgcttcataatttctcgtattacaaattccgcttcatcacgttctgtcattgcttcatagtaatgaattttctcaccattcgtatttgcagtccacagtccttttggcttacgttcagaattatttttaatcacttcgttagccgcatttaaaatcgttttcgtcgaacgataattttgctctaaaaagattgtattcgcttctgggtagtctttttcaaatgataagatattttgaatatcagcaccacgccaaccataaattgactgatctgagtcacctacaacacataagtttttaaacttacttgctaataatttaactaatgtgtattgtgctttattggtatcttgatactcatctacatgaatatattggaatttgttctgataatattctagaacttctggtacacgctcaaataagttaatcgttgtcataataaggtcatcaaaatctaacgcttcattacgtgacaattggcgttgatatccactataaaccgttgctaccatttgcgagtgataatctgtggcttctttttgagcatctgcaggtgttttaagttcatttttcaaattactgattgcaccgataaacatacgaggttcaaactttttactatcaatattttcattttttaagacgtctttaataacagatttttggtctgtaggatcaattatcgtaaaattgcgttctataccaattcgatctgcatcacgacgtaaaatacgaacacacattgagtggaatgttgacatccaaataacttctgcttgatcacctactaatttttgaacacgttctttcatttctcttgcagctttatttgtaaaagtaatagccaaaacattgtatggtgagacatctttttcgtctaataaataagcaattctatgtgttaaaacacgtgtcttccctgaaccagcacctgccataattaacaatggtccttctgttgtctttacagcttcactttgctctgtattcatatgatttaataacgcattcatttactagactcctttatttttactgtttttaaagcttttttaatatctttataaataatatcaccgacgataattgtatctgcaatagctgccatctctgtcgcttgttgttctgaggaaataccgccaccataaaatagttgcgtttctgttagatgttctgagacagcttgaacctttgatacgtcgccataaatgccactatactctatatacataaccggtaatcgatacatatgattgaccatttgggcatatgcttctaaatcttctgttgttaaatctgtatttgctttggtatgttttgccactttgctatcagcattgcacacgacatacccttcaaatattacttcttcaaaatctatactatgtccatatgttttaagcgcttctaataatgtaccattgtgaaatgcaacatctgtactgttcagtactgtaggtacaaaataaaaatcaaaaccaggcattacactttcgatgtttgatatttcaagtactaaaggcaatgggtatcttcttactctgctcattaaatgaatgacattatcttcagtaacgtcatcagttccaccaatcataattgcatctgtttgagacatacaaatcgcatctaaatcatcatctgaaatatgtttagctgggtctaatttaaaaatatggcgccattttttaatgtcatacattttccgaaactccttttttaacatacatatgattatagcatttttaagtgtcgagttctaaagacttaatatgaaatttaagttcttttactctgtaaattttttcgtgaaaaaacaatgattatctaccttattagtgcagatagataaccattgtttatcgttcatttattattcatttgtttcaatattcatacgatctaaaatcattgtataagcatcattaccccattgtaatgaacgcttcactctagaaatcgttgcagtcgatgctccagattcttgttcaatcgttgcataggtataaccttgcttaatcattttagcaacttgtaatctttgagacagtgattgaatttcatttacagtacacaaatcatcgaaaaattggtaacattcttctctattttctaacgttagtattgcatcaaacaattcatctaacgctgcacctcgtaatttttcaatttgcatatcgaaacaacccctataattttattctttatgtcattttaacgcattaacctattaaagtgtagcgatttatattttattaaatctgaatcgttactttatttaattttatgctaatccagcgcgttcgaaaatagtatcaacttgattcaaatgatgtttaggatcgaaacattcatccaattcttcttttgttaaaacacttgtaatagactcatcttgttcgattaattcacggaaaggtgttttcgtttcccaagatgtcatcgcttttggttgtactttgtcgtatgcttcttcacgaaccatacctttattaattaatgctaataagacacgttgtgagaaaatcagaccaaatgttttatctatgttattacgcatattatcttcaaatacagttaaacggtccacaatattcgtgaaacgattcaatgcataatctagtgctattgtaacatctggtaacataatacgctcagctgaagaatgagaaatatctctttcatgccataatggcacattctcataagctgtagtaatataaccacgaattactcttgaaatacctgtgatattttcagaaccaattggatttcgtttatgaggcattgcagatgaacctttttgaccctttgcaaatgcttcttcaacttctcttgtttcggttttttgaaggttacgaatttcaacggcaaatttttctagtgacgtcgcgattaatgctaatgtcgcaatatagtatgcatgtcgatcgcgttgcaatgtttgcgttgatacaggcgctgtgccaatacctaaatgtttacacacataactttctatttcaggaggaatgttagcaaaagtacctactgcaccactcattttccctacttcaatttcttctcttacttgtttgaaacgttgtaagttacgttgcatttccgtgtaccacaatgccattttgacaccaaatgtagttggttctgcatgcactccatgtgtacgtcccatcatcaatgtatatttataattttttgctttttcagctaaaacgtcgataaatctttctaaatctttttcaataatgtcatttgcttgtttaataacgaaacttaaagctgtatctacaacatcagtagaagttaaaccataatgtacccacttacgttcttcacctagcgtttcagaaacttgtctagtaaaagctacaacatcatggcgcgtttcttgttcaatttcttgtgcacgttcgacatttacctttgcgttttgacgaattttttgtacgtcagctttcggtatatgtcctaattcactccatgcctcacatgctaaaatttccacttctaaccatgcttcatagcgattttgatcagtccaaatattagacatttcttctctagaatagcgttcaatcatttttttaactcctatcgtatgtatactcgaattttcaaaaacagaacatttttaataaaaataaataaaaagttcgtttttaactctactcttcacagtttaacagaattggttataaatgtataaaaaatttccgtatattctcattctattttattttttacattaatacaattatctatggcagattaatactgatttctaattgcaaatgttcgcaacactttaatctaattggtatttataatgatccattaagaatatattattacattttagtttttctcccctcacctacactatccaactttttattacaattaggacaatcaaaagctttagtaataccagataatattcactttacttctcctattgtatggaattttcaacaatctacttttcctagtttcataatatttcttcttacatttccataatatgttttaaaattattcacttctaatataacaaattttctactcacaaaaagaatatatgttctattgcataggtatagcattttaaatataagccattattatcgaactccagaatcgtataaatacgaaactgtttatagaaaaatacgcagagattttcttaatagtaaatttttatagcaagacataaattgactacgcctctttcgaaatcaactaatatattttcatgaagctttcgatcatattaattattgaatgagatgtttgcaatttagtaaataagctactaaattattacataaactgataatgtgtaaaaattaaatattttttaaacatagattaaaaatttatattgaaactcttaactaaatttaatataattattttataataaaagaaaggagtttttatatgaaaagaaactttccaaaattaatagctttaagtttaatactttctttaagtgttaccccaattgcaaacgctgagagcaattcaaatatcaaagcaaaagataagaagcatgtgcaagttaatgtcgaggacaagagtgttcctactgacgtacgtaatttagcgcaaaaagactatctttcttatgttacttcacttgataaaatctataataaagagaaagcctcgtatacacttggtgaaccttttaaaatttataaattcaacaaaaagagtgatggtaattattattttccagttttgaacactgagggtaatatcgattatatagttacaatttcaccaaaagtcactaagtattctagttcatcttctaaatacacaatcaatgtttctccatttttatctaaagtcttaaatcaatataaagatcaacaaattactattttgacaaactcaaaaggttactatgtggttactcaaaatcataaagctaaactcgtactaaaaacaccacgtctagaagataaaaagttaaaaaagaccgagagtatacctactggcaataatgtaacgcaactaaagcaaaaagcttctgtcactatgccaactagtcaatttaaaagtaataattatacttacaacgagcaatatgtaaataaacttgagaatttcaggataagagaaactcaaggtaacaatggttggtgtgcaggctatacgatgtctgcattactaaatgcgacttataatactaacaaatatcatgcagaagctgtgatgagatttttacacccaaacttacaaggacaacgattccaatttactggtttaacgccaagagagatgatttattttggacaaactcagggaagaagtccacaacttcttaatagaatgactacatataatgaagttgacaatcttactaaaaataataaaggaattgctgttttaggtagtagagtagaatcaagaaatggtatgcacgcagggcatgccatggcagttgttgggaacgctaaattagataatggacaagaggttataattatatggaatccatgggataatggttttatgactcaagatgctaaaaacaatgttattccagtatccaatggcgaccattatcgatggtattcatctatttatggttattaaaatttgtattttagaaaggtaaataatattatggaacaatttgaattatttagtattgataaattcaaatgtaattcagaggctaagtattaccttaatattattgagggagaatggcaccctcaagatttaaatgatagccctttaaaatttattctcagtacctcagacgattctgattacatttgcaaatatataaatacagaacacaaacaactcacattatataataaaaataatagctcaattgttattgaaatatttataccaaatgataataaaatactactaacaattatgaacacagaagctttgggaacttctcctagaatgactttcattaagcataagtcataagactatctagatatgattaagtaaactattaatcttattaaaggtctctaggaagaaaaaatttcatgcgatgagattgttttagaaaaagcgacgatatatataatctaacaataattttaaaatattaagaacccccagcatacgctttatatagcttgctgggggtttttaatacaatatggattgagcatcttgcatgtataaacacttaggctattcaaagtaaaattactcaaactttgaatagcctttcctcttcaaatagtctttatttaaattggattatattattggattttcttacctacaaaaatgatttcttgatgtgatacttcaaccgtgccatctttttgctcttgaaacacgggtttttcaatacgttttaccggcatatacccttgcattttcattcgtgacaagcaatcagcaattgtttcattctcatttactttgaatttcatgttctactacactttccagttcttctggttcataatctttaagctttctacgacgaatgcctttagtccagaatccaccatgtatgtttcgaggttcatacgcaatgataaatgctttcggatctaaattttttatcgtatccatcaatttacgttcatattttcttggtgttaaaatttgcatcaccatacgactaccatctctaccaaacgcagcatagtgcgtaacgccatatcctaaatttcgaagttcattcggtaaatctaactcatattctgctgaagttacatttacaactgtataacctaatgccagtttttcttctattttcataccaacaatgatacctattgaaaaaccaaatgcgtaggcaataatattttgaatatggtctaaattagacataaccaaacctaaaccaacgatataaactaatacttctaaaaaactaactgatgcagcaatataacgataacctttcaacgttaaaattgttcgcatcgttaaaaacgttacataacaaacgttaatgataaatatagttagtaccattaaccatggattttctgttacgaatgacataaggcgccccactctctttcaattacactttaaataccaaactgcttcaaactaaccttaatgaatgcatattaatataatatagtacgaaaactctcataaataaatagcgaatttgtcataaataaaaatttattcttaaatgaacatacttactttagttcatatactttcaatttatatactgaagtagcctagctgaatgtggtttaacgttattaattctaactcatatttaatttaagtcacacgttagaagaaaaattaaattaggattttggccacgtgtatcttgtatatgcaagttcacgtttgtgtgcatttcgtatataatgattttcaattactttttgttcttctggcgtaactggcttaccttctaaataattatcaatcgcctcataagttacacctaatgcatcttcatctggaagctgtggtttatcatcttctaaatcagcagttggcgttttttcatataattcctttggcgcaccaagatacgctaataattgacgaccttgtcgtttattcaaaccaaatataggtgcgatatctgcagcaccatcaccgtacttcgtataaaaaccagttatattttcagctgaatgatctgttcctactacaataccttgtcggtttgaagcaattgaaaattgtactttcatacgttcacgcgctttttcatttcctttttggaaatctgtaagaacaataccggcttcttttaatgattgcacactttgatcaactgcaggtttaatatttacagtaactatttcgtctggttcaatgaatcgcaaagcttgctcaacttcatcagcatctttttgaactccataaggtaatttaactgcaataaacgtacaatcaatgccttcttcacgtaattcgttaacagacatttgtactaattttccaactaatgtagaatcttgtcctcctgaaatacctaacactaaagattttataaatgaatgtgattgtacataattttttataaattgctttaattccataatttcttcagcactatcgatacactttttcactttcatttcttgtacaataacgtcttgtaatttactcattatcttcttccatctccttaacgtgttccgcaacttcaaaaatacgtttatgtttattatcccaacatgccttgcttaaatcgactggatattcttgtggattaaggaaacgcttattttcatcccaaatagattgtaatccttgtgctaaatattcacgtgattcatcttctgttggcatttgatatactaatttaccattttcataaatattatgatgcaaatcaatggcttcgaaagattttataaatttcattttataagtatgcactggatggaataattttaaaggttgttcatcgtatggattttcattttccaaagtaatataatcgccttctgctttacctgttttcttgtttataatgcgatatacatttttcttacctggcgtcgtaaccttttcagcgttatttgataatttaatacgatcactatatgaaccatcttcattttcaatagctacaagtttatatactgcacctaatgctggttgatcgtatcctgtaattagctttgtaccaacgccccaagaatctacttttgcaccttgtgctttcaaactcgtaatcgtttcttcatccaaatcattagacgcgataattttagtttcagtaaatcctgcttcatcaagcatacgtcttgcctctttagataaataagcgatatctccagaatccaatcgaatacctacaaagttaattttgtcacctaattcttttgcaacttttattgcatttggcacgccagattttaaagtatggaatgtatctactaggaacacacaatttttatgtctttcagcatattttttgaaggcaacatattcgtctccataagtttggacaaatgcgtgtgcatgtgtaccagacacaggtataccaaataatttacctgccctaacattacttgtagaatcaaagcccccgatgtaagcagctctagcgccccacaatgctgcatcaatttcttgagcacgacgtgtaccaaactccattaatttatcatttgatgcaatttgacgaattctactagcctttgttgtaattagtgtatggaaatttacaatgtttaataaaattgtttctattaattgcgcttgaatcaatggtgcttctacgcgtaacaatggttcgttaccaaagcataattcgccttcttgcatcgaacggatgctgcctgtgaattttaaatcttttaaatatgataagaaatcatccttgtagccaatagactttaaatattccaaatcagattctgaaaatccaaaatgttctataaaatcaataacgcgttttaaaccattaaaaacagcatagccactattaaatggcatttttctaaaatacaaatcaaatacagccattttttcatgaatattatcattccaataactttcagccatatttatttgatataagtcattatgtaacattaaactgtcgtcttctaattggtacacctgtatctctccaatcgacctaaatattttcttacattttatcataattcatttttttatatacataagagccccttaatttccatacttttaattaaaatcaaccaacaatttaatgacatatacataatttttaagagtattttaataatgtagactataatataaagcgaggtgttgttaatgttatttaaagaggctcaagctttcatagaaaacatgtataaagagtgtcattatgaaacgcaaattatcaataaacgtttacatgacattgaactagaaataaaagaaactgggacatatacacatacagaagaagaacttatttatggtgctaaaatggcttggcgtaattcaaatcgttgcattggtcgtttattttgggattcgttaaatgtcattgatgcaagagatgttactgacgaagcatcgttcttatcatcaattacttatcatattacacaggctacaaatgaaggtaaattaaagccgtatattactatatatgctccaaaggatggacctaaaattttcaacaatcaattaattcgctatgctggctatgacaattgtggtgatcctgctgaaaaagaagttacacgcttagcaaatcacttaggttggaaaggaaaaggtactaattttgacgtgttaccactgatttaccaattacctaatgagtcagttaaattttacgaatatcctacttcattaattaaagaagtacctattgaacataatcattatccaaaattaagaaaattgaacttaaaatggtatgcagtccctatcatttccaatatggacttaaaaatcggtggcattgtatatccaactgcaccctttaacggttggtatatggtaactgaaattggcgtacgtaactttattgatgattaccgttacaatttactagaaaaagttgcagatgcgtttgaatttgatacacttaaaaataattcatttaataaagatcgagcacttgttgaattgaactatgctgtgtatcattcctttaaaaaagaaggcgtatcaattgtcgatcatttgaccgctgcaaagcaattcgaactattcgaacgtaatgaagcacaacaaggtcgtcaagttaccggaaaatggtcttggctagcaccgccattatctccaacattgacgtcaaattatcatcacggatatgacaatacagtaaaagatccaaactttttctataaaaagaaagaatcaaatgctaaccagtgccctttccatcattaagttagtagaggtgtagcatatgcaattatattatttaggccctaaaggtacattttcatatttggcttgtcgtcagtatttttctgaaaatgaagcaacttttcaaccaaagtcaaatttatttgaagtcatcaaggcagttgcagatgatgacacatcgattggtgttgtccctattgaaaattctatagaaggaacaatcaacattgtggcagatgcacttgcacagcaagatgtctttgcacacggtgaaatacgtttagatattaactttgcattatatggtaatggaacagattccatttctgatattaaaaaagtgtattctattgcaccagcgatcagtcaaacaacaaattacatacatcaacatcaatttgactatgattatgtcgacagtacaattcaaagtttgactaaaattgaaaatggcgttgcagcaattgcacctttaggtagtggtgaagcttatggttttacacctattgatacacatattgaagactatccacataacgtgacacgttttttagttataaaaaatcagcagcaatttgatcaaaatgcgacatcattgatgtttttaattacaccaatgcatgataaacctgggttgttagcaagtgtgcttaatacatttgctttgtttaatattaatttatcttggattgagtctcgtcctttaaaaacacaattaggtatgtatcgatttttcgttcaggctgattcagcaattacaaccgatataaagaaagtcattgctattttagaaaccttggatttcaaagtagaaatgattggcgcttttaattaaactttattttctaggttctacaatttaaataaaataaagagtcaaccaaggattaaaataggaatccatccttggttgactttcttttgtttgtattgtttttacacgatgctgcggtatacgtttcgttaccactcgttcaagcaattgctaatgtaactttttatttttcgttctaatctgcaattactatttcaatggcagtggttgatttatatcaatacctaaaactataggcattacataatacacgactaaaataataattattgcactgattaagtttacccagaatcctactgatgccatttgtttgatagatattttacctgaaccaaagataattgcattcggtggtgtccctactggtaacatgtatgcacagttagccgccatagctgctggtgccataagtagtaatggatgcactccaacagcaacagacaacgttgctaaaatcggtaaaatcatcgttgcagttgcggtattagatgtcacttcagttaaaaataagacaaagatcgttatgacaattacaataagaatcggactaacaccatttaatgatttcaactgttcgcctaaccattttgctaaaccactttctgatataccttttgctaatgctaaaccgccaccaaataaaattaatacaccccacgggagctcttttgcaacttcccagtcaatgatacgacgatgtttttcagtatttttagctggaataacaaataataatattgatataaaaatagcaatcgtaccatctgcaacggatgacgtaacttcccattttttcagaagaaactctcttgtaatccataataagctggcaagtacaaagatagtttgtactaccttttcttcatacttcattttgccaagctcgtctaacttttgtttaattaacgtctgaccaccaggtaaatatttcaaatcatgtctaaacgcaacatatcttaaatagagccaagtaatacctaacaaaacaatgaccgttggaatccctacaatcatccatttagcaaaactaatttcatgtccaaaatgttgcatgtattgtccttttaaaataattagcggcggcgttccgataagtgtacctaatccgccaatcgtacctgcatagccaattgctaaaactagagatttttcaaacttttgaatacttgtttgattcgtattggcttcttgtaaatcatgtgcttccttaataattgctaaaccaataggaatcatgatcattacagctgcagtgttcgatacaaacatagataagaatcctgttgccaccatgaatccaagtaatatttttgaagtgcttgcaccaattaaattaataattgtcaaagctactctcgtatgtaaattccatctttccattgcaattgccaaaataaatccacctaaaaacaaaaagataatatcattgccatattcggatgatacttgttctggtgtaagtatgtgacctaatggtaataacacaattggtaataagctcgttgctgcaataggaattgcttcagtaatccaccaagtcgcaatccataaagtaatcgctaagacatagacgcctttccaaggtaagtcttgtggatgaaagaacaataatgttaataggaaaagtaatggacctaatattagtccaataagttgtcccgcactaaacggtttctttttctttgattttgaaaagaatgttaaataccttttcgatatcattgattgatgttgattgaaataagccataaatttccccctcatgatgattatgataagctacttcaactcactatattagagtatagaaagttgtctatcttgtattatcattaccgtcaaaataccccttttatcagataattgggtttattatagcatatttataccgttttatgaatgcgctttcaaaaaattatctactattcttaatcttaatgtcatgcgaaactttttacttttttatttcatctacattgattgtagtaacttgaatacccgcttcaacaggacttaaaaacactgtatcaatatcttccatatgaattgattgagtcgaattattgaatgtattcccaacgattaatacatctttatgtttaacattattataattacgtacatgtatcgcatctttagacattgatcctttaaattcatttccaattatattcatatttattcctgcttgggaacctaagtcttttcctgtcatcacatctgcagcatttttaccatctctaactcctaaatatctaataccaccctcacagttaataaacttattattaataatgaaagcatctttatacttcaagggagttaatgcataaccttgtatatcttcaaatatattatttctaatatgaatattctcatagtaacgattatgtctacttgcatgtgagccaatagcacgattccaacttcccatttcgggcaattctgaaggtccaaaataacaatcttcgataatgacatttttcgttatcgtaccatctgtcgttccgaattttggaaaagcaccaggtacttgaatgtctaattgtattgcttcagaataaaagcgttcgccactatagtctacgaatccttcaaatgaacagtttttaatatagagtccattaatcccacaagcatcaattgcatgaccactcactacattcttaatggttacacctattaattgaatatcttcagcatgcccaatgcacatagctgtattgttataaggatacgatacgccattcatatcaaacttgccgcctttgatatgaatatgactgtgtccattataaccacgataaaaaccaaagcgatgaccattttttaataaaggacccgaatgacatcggcgtaaaatagtttcattatctaacaaaagtgttgtattgccatatatcgttaatggtttgcaaatatcatacgtccctttcggtatataaactgtcgttggtttacatcttccatgatttaacgcacgttgtattgctcgagtatctttagttttgtttatgcctgttaacccataatctttcatattgatatacataaatcgtcatcctttgtctattttttaatcactcatatattaaccaattattcaaattataatcgtgttaggttgatttagcagatagtcataaatctcgtgatgtcatctattagcatttttatattcaaaacatcatcacttgatattagttctaagtttgtcacatttagtattctattacagctattttaaaactaccgtaaaaacatcttataatatttgttgattgcgtgatttgctcttccaaaaaagttgattaatctatatacttaatctatatttatatattaaccattagggttaaaaattactctagcatttatgaatagatgggagtttattttattattatataggagagatgttgaatgacacatcgcgcactattagttgttgactattcatatgactttatcgcagacgacggcttactaacatgcggtaaacctggacaaaatattgaagattttattgtttctcgtatcaatgactttaattattatcaagaccatatattctttttaatggatttacattatttacatgacattcatcatcctgaaagtaaattattcccaccacacaatatcgtagatacaagtggtagagaattatacggtaaagtaggtaaattatacgaaacaattaaagcgcaacctaatgtacatttcattgataaaacgcgctatgattcgttctttggtaccccgcttgatagtttattgagagaaagaagtattaatcaagtcgaaatcgttggtgtatgtaccgatatttgcgtgttacatacagcaatttctgcatacaacttaggttataaaatttcagtacctgctgagggagtggcttcatttaatcaaaaagggcatgaatgggcacttgcacatttcaaaaactcattaggtgcagaggtagaacaacacgtttaaatcgtgctaaaataattataaagaatacaatatacaagggagatatttgacaatggctaaaacatatattttcggacataagaatccagacactgatgcaatttcatctgcgattattatggcagaatttgaacaacttagaggtaattcaggagccaaagcataccgtttaggtgatgtgagtgcagaaactcaattcgcgttagatacatttaatgtacctgctccggaattattaacggatgatttagatggtcaagatgttatcttagttgatcataacgaattccaacaaagttctgatacgattgcctctgctacaattaagcatgtaattgatcatcacagaattgcaaatttcgaaactgctggtcctttatgttatcgtgctgaaccagttggttgtacagctacaattttatacaaaatgtttagagaacgtggctttgaaattaaacctgaaattgctggtttaatgttatcagcaattatttcagatagcttacttttcaaatcaccaacatgtacacaacaagatgttaaagcagctgaagaattaaaagatattgctaaagttgatattcaaaagtacggcttagatatgttaaaagcaggtgcttcaacaactgataaatcagttgaattcttattaaacatggatgctaaatcatttactatgggtgactatgtgactcgtattgcacaagttaatgctgttgaccttgacgaagtgttaaatcgtaaagaagatttagaaaaagaaatgttagctgtaagtgcacaagaaaaatatgacttatttgtacttgttgttactgacatcattaatagtgattctaaaattttagttgtaggtgctgaaaaagataaagttggcgaagcattcaatgttcaattagaagatgacatggccttcttatctggtgttgtttctcgaaaaaaacaaatcgtacctcaaatcactgaagcattaacaaaataatactatattactgtctaattatagacatgttgtttttaactaacagttcattaaagtagaatttatttcactttcaatgaactgttttttatttacgtttgactaatttacaaccttttcaatagcagttttcatttctttagctatcctaacccacagattagtgatttctatacaatttcccttttgtcttaacattttcttaaaatatttgcgatgttgagtataaatttttgttttcttcctacctttttcgttatgattaaagttataaatattattatgtacacgattcatcgctctattttcaactttcaacatatataattcgaaagaccatttaaaattaacggccacaacattcaaatcaattaatcactttttccaaaataatcatataaggaggttcttttcattatgaatatcattgagcaaaaattttatgacagtaaagcttttttcaatacacaacaaactaaagatattagttttagaaaagagcaattaaagaagttaagcaaagctattaaatcatatgagagcgatattttagaagcactatatacagatttaggaaaaaataaagtcgaagcttatgctactgaaattggcataactttgaaaagtatcaaaaatgcccgtaaggaacttaaaaactggactaaaacaaaaaatgtagacacacctttatatttatttccaacaaaaagctatatcaaaaaagaaccttatggaacagttttgatcattgcaccatttaactatccttttcaactagtgttcgaacctttaatcggtgctattgcagcaggtaatacagcaattattaaaccatctgagttgacaccaaatgttgcacgagtgattaaacgattaatcaatgaaacatttgatgcaaattacattgaagttattgagggaggaattgaagaaacgcaaacgttaattcacttacctttcgactatgtcttctttacaggaagtgaaaatgtaggcaaaatcgtttatcaagctgccagcgaaaatttagttcctgtgacattagaaatgggcggtaaatctccagtcatcgttgatgaaacagcgaatattaaagttgccagtgagcgcatttgttttgggaaatttactaatgccggccaaacatgtgttgcaccagattacattttagtacacgaatctgtaaaagatgatttaatcacagccctatcaaaaacgttgcgtgaattttatggtcaaaatatacaacaaagtccagattatggccgcattgtaaaccttaaacattatcatcgtctgacgtcattacttaacagtgcacaaatgaatattgtatttggtggtcatagtgatgaggatgaacgttatatagaaccaacattgttagatcacgttacaagtgattcagcaattatgcaagaagaaatttttggtcctatcttaccgattttaacatatcagtcattggatgaagcaatagcctttattcaccaaagaccaaaacctttgagtttatatttatttagcgaagatgaaaatgctacacaacgtgtaataaacgagctatcatttggcggcggcgctattaatgatacattgatgcacctagcgaatcctaaattaccatttggtggtgtcggcgcctcaggtatgggacgctatcatggtaaatattcattcgacacttttacacatgaaaaaagctacattttcaaatctacacgattagaatcaggtgtccatttaccaccatataaaggtaaatttaaatacatcaaggctttctttaaaaattaatttttgagacaaaaataaaccatgcttccataatttgatgttcttgaaaacaataaatttcaaggtatacacaaattttttggaaacatggttttctttttatcataattaattaaagattaaaatatgacacatacaccttcagatgctacacgagtgttatcacatagcgtaattttacctgtttctttatttctttcgaaaacagttacaactgaatctccttgctcatgagcacaaactaaaaggtcatctgatgaggcaatattaaaatctcttgggaattgaccaccactttcagtaattgttactagttctaagtgttgaccattatcaagaactttaaaaattgcaatgctatcatgccctctattagatacatataagaattgttgatcatgagataaacgcactgctgcaagtttagtatctccatcaaagttttcaggaattgttaaatgacgctcgagctcttcaaatttaccgtcattatattctgcaacactcacagtattggataattcgtgtacgacataagcaaattttccattatcatgaaattcaatatgtcttgtcccatcactatctttaaataaagattctttataaaattcaaacccgttgtcatcaaatttataagtaacgatacgatcagcacctaaatctgttactgcaacatacttaccatctggagtttgattaatataatgtgcgtgtggatgatcttgtctttcatgtgtacctgttggaaaatcatgcgcaagttcttgaattagacgtataatttcacctgtgtgcgtatttaattcatacatacgtatgatgccagcaccatataccgcttcaaataaatatcgtttatcttctgaaatcgatacataacaacctgtaccagcttttgaagacaaacatttatttaataaatgcaattcaccattgtcatcaattttcaaactcgcaacaccgcattgttctccttctttgttgattccatataaaacttcgttattacgcaccaaatatgtagacgcttctaattcaaatcctgtttctaataaatcaatacgtgactgattttcgtttaattcaaaacgataaatccctttaccattctttttagtgtaagaaccaatatatccatttgtcattacttttacccctccatgttagtcttattttcattttattaaattttagctagaattaacaatcatttatcattcccttaaagctaaaactgtttaactactttaaaagaactatttgctggtgatatgtcattattcgattttaattaatcccccttttttacttacacgagcattcattattaacgcgtttatgcttctacaaaatttttgttgcaaaacagaacgcatgttcgtataatgtaattatcagattggggtgaattaaggatgacaagttatgaagaagaaactgattatcgtaacgttccaagagaattactagataacaatatacctatgggaagaggcatgattaagtgggctccttttgcaacattacccgaacaattcgaaacgattcaacaatacattatcgaccaaaacaaaattacacgtcctgtattatcagatgatcaattggctgagctaaacattcggttacacgaggcgctacaatatgcccaacctgtagaagttaaattttataataatggctttgtagattcagtacgcttaaccatttatcgtattgatgctattaattatgaaattgatggttatgtttacaatcagcaacaacgtcaaaaaatttctatctttgatatcttagatattgtcttgttaccttaatgctttgaacataattaaaggcaagaacaatctatattgtccttgcctaaatgttattagttatttttactttcaatatcagaaataatttctttagtttttctttcaatatcttcaaaatcttttttaaagatataagcaaatgctactacaccaacaccagcaactaatgttgtaatagcaactaagctaaatacgaatttaaacacacatttaataaaattccacatctcaatttcacctctgttaaattaaatacctatctacatttcattatactatcatatatagaataatcattaaataaatacccacttttacgaaatatattcatcaaattatatagcgagcaagctaatgattattttcaaaaatgccgaggaacctctgtttcaacgtgacatgaccttatatgctaatgttaacaatgactattatcgtgaatgctaacttaagattgatatttatgataagatgattttaagtttttaacttaatatccccaccatctataaaaatatgttttaactgattgataagtcttatacaccgagaaatcacctcaaacaattttatatttcatttagtaaaatataactttatttaacatgacattcaatatacatacgattactatttatttacaatatattacaactaaaaagaaaggggccgatgatatgcaacaagtgacatcagatatcatgacttttagaggttcacatttcgagttaggtgttaaaactggtaaatggcttcaacaaacacctctgctaaaaaatcgagaaaaagaatggaaaaaacgtgtcccacgtttcgatatagatgtaaatgaaacttatcaaatattccaaacttacgcacctcaaatatgggaagaattaatgggactacaaagtatactcaaaatgccaacacgccaaattattttaaactttggacattatcgttttaccgatttaaaagaaagtggttgcacggtctttcaaggcaaagacttcatggttagaaattatgattatcaccctgcaacttatgatggtcgctacttactttatcaacctacagatagcggtttagctcaaattggtcctgtatcaagggtaactggaagaatggatggtatgaatgagtcaggattaactatgggctataactttatgcaccggaagaaaccagcaaatggttttgtatgttatatgattggtcgtctaattcttgaaaattgccgaaatgtaacagaagcaatccaattattgaaagaaataccacacagaagatcatttagctacatactgatggacaaatcattgaaccatgcaattgttgaagtgacgccgagatcaatagatgttcgttatgataatatatgtacaaatcattttgaaatattaacacatgaaaatcgcaattatacaaaagaatctaaagaaagactagcgcgtaccatttcacaaactaatgataatttagatatgactacagcatttaagttattcaataatcctcagtatgaaatttacagtaaactattcaaaagctggtctggcaccatccatacatcaatgtatcaccctgaaacattaactgcatattttacattgggagaaaacgcgccaccagaaataatagatttcaaatcatggttagatggtcaagaccttaatatcactcactttactggcaatatagataccgacttaacttttgccaacaaataaataacaccgatattagagaaattatgcttcctaatatcggtgcttacatcctttatttattcaactttgatattaccatcaatcgtataaaattctaaaacattgtcgcttttcccaactttaccattagtaaatgttttatttttaactacgctatcacccgttcccggatttagctttagtatagtatcttcaggtttactatcatacttaaaacgaatatctccttgtttagtagaagcttttgcatctacttttgatggcatgtttttaaattcaatgtcaccatgatcgtttaaaaatatggattgtttaatttgactcttgtcgatttgtagcgtaccaataacaactttaatattactatttttaatgttacttttactaatataagtaggactattatttgtctttgaatctagtgcgtcaagatttgagtttttaataactacttcaccgttaatgctttgaatacttgtgttctctaaatcaacatcactgattctaacacttcctgctccagacgatatatttaaacgtttgatcattttatcaggcatttcaatcgttaacgttttcttattctcatgaaaaggattcatatcaattgcatatcctcttgtcttagaccttttatcactaaccttcaacgtcttatctactatattaattaatatatcattgtcaccatcatatttaactctaaattgattcccccgttttatacgaagttctgtactatccaaatttatagatacattgtcaaaagcatcgtctttgaatgttttatcatattgtttagtaccatatttgtttttatcatagctgaaccaaataatggttgctgctgtaaaaaagacaacaaacactaaaagcccaataaaaaagaatttcttcattttctaacgcttcctttgacagttttaatataccaaagtaaatattttaagattaaacgataaatgtattctaaaatcttaaatatgacaatgataaatactaatcctaatcctgaatatgatatggcaaaaaatacattactaattgagtctacaattcctctggatattgctgatgctaataaaataattggacaaaacagcagcaaaagtgatattaaaaataatgctaatacaaataatccaactatagatactggtataaggatgacaaaaatagatagaatgcctaaacttaatgaagcagcaacagctcttgaaatattttcaaatgttggtttagattcagcataatcaataacacttctagcttttgtttcagctgcaacatcttgtgggtcttttaacttctttaaaatttcctcttcatcaacgccattaagttcttgctcataaaaataacgttcatattcatacattttttgatctcttaaatgcctaggtagcgcatcaagtgctgtttctaattcatttaaataagtaatcttgttcatataggtcactcatcccaataaaattattcattcgttttttataactttaagacctaaagctatttactaaaaaattcaatacgtttaatttctaaatcttgataaagtaagtttaattttaaatggttatctctatcaatatactttaccgatgagaaatcattgccaacttttgttcttttatatccgaatccaagattttcaatcgcgttatttatcggcgaaccaattcccccatcaaaattagtatgtatcttttcatctcttactaatattatccccttaacgatgttatccttttctctcactttaacggtaaggtcagggtgagctttactgttataaaatttaaaacgatcaaacttaatttttttatttacttcatagccttttttatcaaacttcacatttaatttaatatcgtttatttcaagattagacaaatccacagttttcgtatgacgatattgatataaaccaattaatacaccaaaagaacagattaaaaataatataaacacaacccagcgattttgaatacgcactgatgtcaccctttctttgtacttatttaaatatagcataaggtgcttcccgtttcatccttaacaaaaattaacaaagaatttgcaattaatttatttcattaccttttattactataaattggtataatgttgtaaatgctaaaggaggtttttacaatgacaaatttagaaacttatttcaaaaatagccaacccttaaatgaatacattgatggaatgaagacaaatcaagataccgttctcagtatctatcaatcatttgagttaccagaagatgattcacgcatcaaaaaaataaaagagatgaattattctaaagtattagtaattactgaagactggtgtggagatgcaatgatgaatctcccaattctaaaacacatcagtgaagcattaaatttagaagtacgcgtgttccatagagatgatgatacaaaactgatcgatcaatatttaacaaatggtaaatcacgtgcaattcctatcttcgtattcttgaatgatcaattcgaacaagaaacagtttggggaccaagagcaaatgaagtccaaaaatttgtaactgatgttcgtgctgataaattaccgagcaaagatcatccagactatgcagatttagaaaaagaaacacacttagttatatcaaaccgctataaaactgacgcttcattttggaaagcagtttataattccatcctaaataaattagaaaataaataaatttacaataagacaaactttgaggttgggaaaatttaaaattcccaacctcaaaattatttttattaaatgtcttttttagcgacatataagatattcaaaatgaagaatatcactatagaacctaatgaaattacccattgccaattgctaaaatcaaagttagagctaatcattttatcagttaagtaagcaaaagggatataatcaaaagcatctaaaactttatcaccgtatcttgggataaatgtaataaaaggtttaataaacggtacaatgagtactaaaaatacacctaatgaaaatatcattgctgttttttgtgatgcaagtgtgattaagaataaaaacaagccaaagaatagtaaaaagattaggaagaaccataaattatctacatatttataaaacgccaaattttttccattgctagatgcctgcacaacaatcaaaatcacataatgaattaatgcaaataatattgaaattaaaataattgaaattgttttcgaaataatgtatccaacgcgtgttttaactttactcatatatagttgaattgtaccttgtgaaaaatcacgcgtaattgtcttaacaacaaacattaatccaattattaacaataaccattttgctgcagcaaatacagatccatagacaataatatgtttcgggttatccatcgaatttgccataagtatactttgagttgcaatcaaactagatacgactagtatcgctaaatatgttaaaggacttttaaaaatactataaagatcatacttaactaaatttaaaattctcattatttatcacctctttgatttatattgaagtacgtatcacgcaatgaacttttacgtgtttcaatatatttcggataaatatctaattcagataatgcttttagtataacttgataatttttttgtgcattgatcattaaatgtccgtctgctttgtcgacattttgtaattggaaatgctctgcaagatatttttcagttctatcaaagtctttatgatcaacagtaactatcgttgtgtcagatgcaacaccttcctccatgtttacatcttgaacaaaatgtccgtctcttaaaaatacagctctatcacaaattaattcaatatcttctaacttatgacttgatattagaattctcatatcaagttcatttactagagacttaattgtagtcagcacatcaattgagccatctggatccataccatttgtaggctcatccaatattaaaaatttaggtttattcattaaagatactgcaattgctaacttttgcttcatccccattgaatatttcttaactttctttttaatataaggtctcataccaaatgcatctataattttgtctgtgtatgctttatcaaaacccttacctaatacttgtgcaaataatttcaagttatacaatcctgatttattatcatataatttaggatgctcaattaaaaaaccgatattatctgcattatcaatatctacttttccatcaaatttaataatattaccattcattactttcataacggttgttttaccaacaccgtttttccctattaatccgacaattctactatcgccaaagtcaaaatcaatatcatttaaaacgacatttgagccgtatttttttgtaatatgttctaatttcatcgactgcctcctttaaattttctagtatttattttattgagctgtttaaaataattaacaataagtataacaatgcttataattagaaaaccgatatttaaaatatatgaatatagatttgggaatgatgattgacttagaacaaaataattcaccaacactattgcaattgaaaataaaaatggaactaaaatgataatagtaaacacgtatataccatatggcactttgactctacgcaattctgtaaattgactaaatgcaattggtatagacaagaagttagatatgacaaatgcatatgcagttgaaaaatagattgaatttggttcaatcacatctgcttcataagcatataaactaataacaagcgttccaattaatgttaaaacaatgcatgtaatatagttggcattaagcaattgtttttttgacactggtaaactcatataaaaataatatgaatcattaccacctaatctacgattgagtctaaataagtgaccagcatctaaaatccaaataatcaatattgttggacttataaaagattgcaataagtaaaagaactttgttgagtcaagcattatataaaaaggatataaggttaataatagaacatagatgataagtgtatatcgtcgtaatttaaaattcctaattaacaatgccttcatttaaaaaccttcttccatcaatttgatgttttcatgatatttaggttttctcttttcaagataaaccattaggttctcaatagaaggtgtagtgatattcactttatgacctaaaatttctttaaatacttgcgcatgttctgttaatcctataaatcccgtacgcttatgttcttcaaaaataagtagagatgctaattcatcatcaaggtcctcaattgcaccactcacaacttgatatctttgtaacagttgttcttttgaaccatttaagataacttcaccgtcacttaagtgaatgatataatcagctattttttctaaatctgagataatgtgtgtcgacatgaatattgttttattttcatcaattaattcttgctgaattatctccaatagctcatttctagctaagggatcaagatctgaagtaggctcatcaaaaatatacaattcagcatgatgtgaaaatgcaactgctagtgataatttcattttcatgccagtcgaaaatgtttttattgatttattgattggtaaatcgaacttttcaagataaaattcaaatacttgatggtcccatttacgataaaaaggggcaatcattttttcaagttgcttcgtagtccatctctcattaaaataattttcagcgtaaacaaacccaattctattctttaactctatcggattgagagccatatcctcttctaatactctaataacaccagtttgaggttgatacaaatccataattaaccttattattgtggttttaccagcgccatttctaccaataaaaccagtgacgaatccttgaggaactttgaaagagatattctttaaattaaactggtcacttgaataattaacattacttaattctatggcattcatgatgattcctcctcataaatgaacgttaaaatatcttgaagttcctcaagtgacatttcgatggcttgcgcttcattaaccaattctttaaccaaattttcaatggtaaaaaattgtttctcttttaaaatagaactatcttgttccttaacaaaggtcccttttcctctaattgttgtaacaaaaccgtctttctctaaatcttcataagcacgtttggtagtaatcaaacttacttgaagatctttggcaagttccctcattgatggcaaatgctctccaggagcaacatgcccctttaaaatattttgttttacttgttgcttaatctgttcataaatcggaaaatcactattgttttttaaaattattttcatcaacgtccccctatcatcttctgtatatatacaatatacacaatatacacaattttgtaaatatgcatatctcattatcaaccagtcttcagaaataacactgagtattgtaatattagcagttgaataaaatgaaatgacactaccatttaatcttgcattgtctatttcaataaaaaagactgtcaaaacgaatattcttatactttaacggtgattgtcgcgtcatcaagaacagtcgtttaaaacagtcaattctatttgttatttttacgtcgatcattacttctacttataaaagcacaaatcataaacataattgctgccaataatagttttataccttggctctcatggtttgttgcttgtaaataataaccaacaataaataaaataattgctaatgctacaaatatttttgttagatgtttcaatttatttcacctcaacatcgacattataacaaatataaagatttatcataacttaatatattgtatagtgtaatataaccaatctctcattggcttacttgatgacaaaaccattcaatcaaaatgattattgattgcgatatattgtgttcaatgatattatttaagtgtatccacagaattatactacataaccccaagtctggtaccagcagacttggggttatttatgtgtgtaggatcattttttatttttccatttcagttctaaccaaagtcgaaaaataattagtaagccacctgtaataagtgtcatcatcccttcttgccaccacatcattacactacacctccgttcgactaaagtatcatactgaaggatgacctacacctattctaacacaaaaacagaacatatgttcgtattttggtagcggattttacatattattcgttaattcaccaacaacactttatctttggtataattgaagataatatataggcatacaatttttttaaagagaggttaagcaataatgaatcctttagcccaaagcttaaatgaacaacttcaacagtcaaatgcaactgcctttgcaatgttatctgacttaggtcaaaatatgttttatccaaaaggcattttatctcaatctgctgaagcaaagagtacaacatataatgcaactataggtatggcgacaaacaaagacggaaaaatgtttgcatcatctttagatgcaatgtttaatgatttaactccagatgaaatattcccttatgcgccaccacaaggcatcgaagaattacgtgatttatggcaacaaaaaatgttgcgtgacaatccagagctatcaatcggcaacatgtcactaccaattgttacgaatgcattaacacatggtttatctttagttggcgatttatttgtaaatcaaggtgacactatcttgttaccagatcataattggggtaattacaaacttgttttcaatacgagaaatggtgcaaatcttcaaacatatcctatttttgataaagacgggcattatactactgattcactagtagaagctttacaatcatacaataaagataaagtcattatgattttaaattatcctaataatccgacaggttacacacctacgcataaagaagtgactaccatcgtcgatgcaattaaagcattagctgataaaggtacaaaagttatagctgttgtggatgacgcatactatggtttattctatgaagatgtgtatactcaatcattatttactgcattatctaatttaaattcaaatgcaatattacctgttcgtttagatggtgcaacaaaagaatttttcgcatggggattccgtgttggatttatgacatttggaacgtctgatcaaacaactaaagaagtattagaagccaaagtaaaaggtcttatacgaagtaacatttctagtggacctcttccaacacaaagcgctgttaagcatgtattaaaaaataataaacaattcgataaagaaatcgaacaaaatattcaaacattaaaagaacgctatgaagtcactaaggaagttgtctatgctgatcaatatcattcacattggcaagcctatgactttaactctggatactttatggcaataaaagttcatgatgttgaccctgaagaacttcgtaaacatttaattgaaaaatattcaattggtgttattgcactaaatgcaacagatattcgtattgcgtttagctgtgtagaaaaagaagatatcccacatgtatttgattcaattgctaaagcaattgatgacttaagataattaatttcaaccaataatctgatgagtatgactcggattattggtttttatttttaaaattattccttctttcaaaccattataagatatattttattcagcaacttatcaaacactatacctaattagttttatacatctctcctaacaaaatttaatttatttggtacaaatttatataacttttagcaaatcaattcaagcatcacatctctacaaatgtaaaaggcaccccacgattgtgagatgccttattataaaattaaagattagaatttaagttcaatatctacctttttaatgtcagttgctttaaatacttttccatctttatactcagtttttaagtctacatattttgacgaaccatttttaaaatacactttatacactgcgcgttcagcaagtcctatgtcatgtttagtaatcccttgatcatttgccattgctgatttaagttttatacttaagtcattaattgtaattttgcttgcattatagaacacaaattcatttgaaactaagttttcaaatttatttattgttactgggaatttcacattattagatttatttattttttttttgatttagtgtgttgttttacatcaatatcaatctttttaatatctttggcactaaataaattaggtgtaaagatgtctgattttaaattcactacttgtttctttccatttttgaaatgtactgtatattttgcttgtttcgcaaattttaagtcaagatcactgatgcctctttcactttttaatacagatttcactttgtcatttaaatatttgtaactaattaattccttttgagacagttttaatttagataaaattggtgttgatgtgccatttactgcaattgtgtatggtacatatctgtctgctttcgctttaggtcctgttttaacagtaatttcaattctcttaacatctttcgcatgaactaagtttgctgtgtaattttttgaatttaactgtaagattcttttaccaccatttttaaaataaacagtataataagctttcttagcatattttaaatcttgttcactaatacctctatcatgcttcagtactgattttatttgactagttaaatctttataattcttccaaggtttatttgaaaatgaaagattcgataaaatgtttgtagatgtaccatttaaattaattgaatatggaacttgatagtttcttttagctttattttcgacatgtttttttgtatctacgttaatattgatacttttaatatcacttgaatttattaaattcgctgtgtaaatacctgctttcaaatcgataactttcttcgttccatttttaaaattaactgtatatttcgcttgcttcgatagtcttaaatctatatcactaatacctctatttgattctaaaactgatttaactttaccctctaaatctttgtaactaatattttgattcttattaaatgttaagtttgataaaatattttggcttgtaccgttcacagtaattgtgtatggaacttggtaatttgctttatctttctttttatcttcaacttgctttttagtatctacattaatattaatagctttaatttcacttgtattaattaaatcagctgtgtaaatacctgctttcaaatcgataactctttttgctccatttttaaagtaaacagtatatttcgcttgcttcgatagtcttaaatctatatcactaatacctctgtctgattttaaaactgatttaactctatcctctaaatctttataactaatattttgattcttattaaatgttaagcttgataaaatattttggcttgtaccgttcacagtgattgcatatggaacatggactttagaatatccatggtgtaacgaacttgatgatttatctaatggcttagctgcggcagacgcttcattattattaaagtttgcacctgttgatgctaaaacacctaatgctaaagttgttgtaatcaatgacttaaatttcataaattatctctccttttttgtgtaattcgtatttgcaacttaattatagccagactttctctgttttttgaattaactgaatattaataataaattatctttaacaataattttttaacactgttaaaagttcttttaattttgattaactaattaatttacaatacctaaaatgttgtttggttttgtttataccaatcttcaaacttaaatgtcataacaacattcatttcttaattccgattacatttgtcggttatatttacagcatctttatactcaaaaaacatttgcttaaaaatataaattcgatttaataattaatttaaatttagttaatcaattttgcatctattttgttgtaagctatataaaaggagtgataatgatggtgaaaaaaacaaaatccaattcactaaaaaaagttgcaacacttgcattagcaaatttattattagttggtgcacttactgacaatagtgccaaagccgaatctaagaaagatgatactgatttgaagttagttagtcataacgtttatatgttatcgacggttttgtatccaaactgggggcaatataaacgcgctgatttaatcggacaatcttcttatattaaaaataatgatgtcgtaatattcaatgaagcatttgataatggtgcatcagacaaattattaagtaatgtaaaaaaagaatatccttaccaaacacctgtactcggtcgttctcaatcaggttgggacaaaactgaaggtagctactcatcaactgttgctgaagatggtggcgtagcgattgtaagtaaatatcctattaaagagaaaatccagcatgttttcaaaagcggttgtggattcgataatgatagcaacaaaggctttgtttatacaaaaatagagaaaaatggtaagaacgttcacgttatcggtacacatacacaatctgaagattctcgttgtggtgctggacatgatcgaaaaattagagctgaacaaatgaaagaaatcagtgactttgttaaaaagaaaaatatccctaaagatgaaacggtatatataggtggcgaccttaatgttaataaaggcactccagagttcaaagatatgcttaaaaacttgaatgtaaatgatgttctatatgcaggtcataatagcacatgggaccctcaatcaaattcaattgcgaaatataattaccctaatggtaaaccagaacatttagactatatatttacagataaagatcataaacaaccaaaacaattagtcaatgaagttgtgactgaaaaacctaagccatgggatgtatatgctttcccatattactatgtttacaatgatttttcagatcattacccaatcaaagcctatagtaaatagtgctcaactaactaataactcgcttcgttctaaaaagtcgaagcgagttatattgttaaaatttgaattgactgagtctaggacataaatcaagttctaggctctataatgttatattgatattagttgactgcgtggtcccaacacagagaatttcgaaaagaaattcgaaaagaaattggaacaccaatttctacagacaatgcaagttggcggggccccaacatagagaaattggattcccaatttcgaccaacaatgaaagttggggtgaccccaacataaagaaatactttttctttagaaattagtatttcttatgcataagttttactcatgtattcctatttttaagtacatattagctgtggctaatgtgtaagaaccactacataataaatcgttagtggctctttatcatttctgtcccactccaatatttcttcattaatatagatacttcgtctgcacttaaatatgattcatacactgcacatcataataaatctatctactcaaatataaataaaagttacctactacattctatgtagcaggcaacttttattacttatttcttttcattatcattaagtacttttacaaacttcacatcatgtgtcttccaatcaacttcatataatgctgataatttttcttcttttttatctacatggttttcaccagaccaatagccccagaaaccatggcgattccaatctattttaaactcatccattgatcttttataatgaacaacaaattttgatttaccttcatcttttttatcatgtgacataacagctaaaaattctggattaaacccttcagacacagttacaggcattttgtctttaggtgtgaaattatctttcgcccataaatttccatttcgtgttaaagaaaagatttcacttttagttctattatcactatcattagttaattgtctcgtatggtcatgtcccatattatttatcaaatgtgcttctactttccaacctacacctttatgtgacgtagattgatcaagtaatgtacgatatgatggttgttgataactaatcgtctctgaataattactctcttttgtaatatttccagttaatcctccacgattaatcgaaaaatctccacctgttttataaccatacgtatatttaacttctcttgattcatcctgattttttggtgcaaagtcagtcacatttgtatggttgttgtcatcaacattttgaattgaaactgaataagatccaggccatcttaatgtactattccaataaccatttgggtctaaaattctcaaaccactaccaatagtaccttttgctttaataaatactgtttctttatcataattaggttcagttatgaaattaaattgtaagctttgagtaatatttttttgactatcacttgttgtagctgtacgtgtatacattttagtatcaccatcaagattcttctcagaaacagctttaatttcagaattaatttttgcataagaagttgccggaaatacagttaatgcagtagatattgctaaactacaaattgtgatgtttttgtataattgtttaatcatcagtaatccgccctttcaatattatccttctttataaggtttattgtcatcagaatatttatcaacgactttaactgttttatttttccaatcaacttcataagtgacaattaatctttgaccatctttatttttttctaaaattggaggtgcataatgtatcccaggtctgtttttcaaaatatcttgatttcgtgtgtatgttacttcaaattgcgttttctcatttgacttttcattagataaataagttaaaaattctggattaaagccacttcttactaatgccgggtatctatattttgaagcaaagcttagttcagggttttctacagtagcaattctcgtatttctatagaataataattcatcatttctatttttcacttctccaccatacttcaagtcattcgcaataactgaccagtgtacatgccagttattatttttaccgctggcaattgtgtcataattttgctgattataactaatcgttttggagtagctatttgatgaagttcgtccaatacctttcgttgaatcgaatttaccacctgagctatatgaaaatgtactgtctactttcgcagttgaaattttatttttcggcaattggtctagtatttcagttttaggatttctttttacttgaaaatctacatggtactcacttggatactttaaccaatttgaatttttttcttctttatgagattcaaactttaaatttgaatgaattgagccttgttttttaacaagtaatacattcttgtcataagttggatcatcgataaagtcgaattgtaaattttggagtatatttgttttctcatcatatactgtttcagttcgttttgtgattttaccgtttttcccaatatcatcaggtactgttgaatttttatctttattagtaacattacgtttgtctttttgttgagacttatcaacatgttctttcttattttggtcttgcgagtctttatgagctgaatttgcttgagtcgttgctgctgataacaataaaattgcacatgataatgatgacgctattaaaacacgttttttatttttcattgttataaccttctttcgtatgattgatatttgttgatatgtatcgacatgtgaataatatcacaaaaatagagaatatatatttaactatttattaaatgattttgttaatattattaaatactttatcctctttaaaaataatgtgtgtacaaagtcattaatttagcaaatatttttatttagtagttaataaccatcgatttgaaatttatatttaattattagataaataatatcctgcatctttctcatacaatttactataaaattaagcatacccgatatcagtgttaataagatcgttgatactagacagttaatttcatagaacgaaatcaaataacacactactttctgcattttaaattatgtttaagaataaaaattatgtttatataaatatatatactactttgaaaaggtgtgagcttaatgacaacttttagtgaaaaagaaaaaattcaattactagcagatattgttgaactacaaactgaaaataataatgaaatagacgtttgtaattatttaaaagatttattcgacaagtacgatattaaatctgaaattttgaaagttaatgaacaccgcgccaatatcgttgcagaaatcggtaacggctcacctatactcgcattgagtggtcatatggatgttgttgatgcaggaaatcaagataattggacttatcccccttttcaactcacagaaaaagatggcaaattatatggtcgaggcacaacagatatgaaaggcggtctgatggctttggtcatcacactcattgaattaaaagaacaaaatcaattgcctcaaggaacgataagattactagctactgctggcgaagagaaagaacaagaaggtgccaaattattggctgataaaggctatttagacgatgtagatggcttaattattgctgaaccaactggatctggaatttattatgcacataaagggtctatgtcatgtaaagtaactgcaactggtaaagctgtccatagctcagttccatttattggtgacaatgcaattgatacactgcttgaattttataatcaatttaaagaaaaatattcagagcttaaaaaacatgatactaaacatgaattagatgttgcacccatgttcaaatcattgataggaaaagaaatttctgaagaggatgcaaattatgcatctggtcttacagctgtatgttcgattataaatggcggcaaacaatttaactctgtaccagatgaagcttcacttgaatttaacgtaagaccagttcctgagtatgataacgactttatagaatcgtttttccaaaatatcattaataatgtgaatagcaataagctttcactcgatattccaagcaatcaccgacctgtaacaagcgataaaaatagcaaattaattactacgattaaagatgtagcttctagttttgtagacaaagacgatatatttgtttcggcgcttgtaggtgcaacagatgcctctagtttcttaggtgataataaggacaatgttgatttagccatttttggaccaggtaatccattaatggcacatcaaatcgatgaatatattgaaaaagatatgtatctgaaatatattgatatttttaaagaggcttccattcaatatttaaaagaaaaataagaacgatgctgtcagcttccttattcgcgtgctggcagttttttatttcgaattttaagttgatagaaatagcgatgaatattgtttgaatgtaaatattcaaatatcaacaagcacattttcattgattaagtgatgtaaaactaaaattatggtggtgatttgtcatacatgtatagactaatggtcataaagaaagacgccttccaatagtttagtcgactaatggaaaacgtctcataataaaatatattttcgtgtattctaatattttcgtgttatgaatcataatcgtccaaaacctaactttttagttaataaaaactagaaaatgagattatattattcctaccatgccatcatattctgttagtcatttaaaggtttaattttttattaaatttaaatatacacaacttcttatatagtaaattttcacctaataattgaactatttgattcacatagcctataaatccacaaatatagttatgttattaactaggttttggtttatataatgctaaatatgcacccatacatgctaatataatcccgactactaaatttatacttaaatgagtttctcccataataacacttgctataccaccaattgcaggaaacatagcaaccatgtaaccactttcagctgctccaatattattaattaatttcagatagaaaaaccaggctaaaaatgaagctagaatagataaatataataaactaaaccaaaaatttaattctaatggaaatgaatacctatatccattgaaactagtataaataagtaaaaatatcactgctgataacataccaattgtatttgacaaaacaggatgaactttactttcactgttatataaagataaaacatcaccaattgacgttataattgcacctaaaagagcaaatgctacaccaattataaattcatttgttaagctgtttaaatcaggatataagattacaactacacttacaactcctagtcctccccctatatatattctgttagaaattttcctcttgaataccatactaataaatataggtgttaatatggctttcattgaaaaaatcaatgtaactatagcagctgaactatagaaagtaccgtaataaagaagcaaataacttatagtaaagttacatagtccaaaaccaattatcgtaaaccaatttgtattatttaatttcagttttttaaaaataaatatgaacattacaccgaatagcgaaaaagcaattaaagatctatacaataaagcaacttctaaaggcaaactatctccttgtatctttaccgctataaagtttaatccccatataaacatgcaaaacaggtacattaaataattcataattacacacttctcctaatgttcaaaaaatcaaaaacataaacaattgaagaaaccaataaatccatttgttcttttgtgtgatttggcgttacattaattctaaatctttcagtaccaatttctacagtaggtgaattaattgcttgaacataaatattaaatttatctagaagtaactttgctgcttcctcacatttttttgaatctccaattataactgggagtatatgtgtcttactttgtttcaaaacttcaataccattttctttgaatttttcttttaagtatttcgttttatcttgcaattcttctcttaatttatcattacttctgactatttttatactagttaaacaacccgcagcaataaccggaggtaatgcagtagtaaatataaaacctgaagaatatgatctgattacatctatgagtaattgatctccggttatatatcctcctattattccgattccttttgccattgtagattgtatgatgtctatatcttcctgaacaccaacaacatcagagtatcctcttccttcttcaccatacatgccaattgcatgtacttcatctaaaaaagttaaagaattatattcttttgctaattcgactatctctactattggtgcaatgtctccatccattgaatatacagactcaaatactattaactttggtatattaatatcatattgattcagtaattcatttaaatgtttaacattattatgttcaaaaatttcaatcttatttttaacacttcgcaaagcatttattatagacgcatgatttttagaatcagaaaatacaatcatttctgggaatattcttaataaaccttgcaaagacgcatcatttgaagagtatcctgttggaaaaactaaagctgagtcctttttatgccattttgctatctcattttctaatagtttaaaatatttatggcttccaccaatattccttgaaccacctgcccctgcaccatattcttttaaagcatcactcattacatttattacttcttgattttgagacatacctaaataatcgttactacaaaacacaacaacctctttaccatcttcccctttggctaatggatatttgtttgcaatcctgttaatctcagtaaatattctatagcttcctttttcttttaattcagcaattttgtcaaaaaataaagttttatacatttttatatcctttttttaccaaattttatgttaaaaatattaccaatgataaacagattcaccccttttttatatttatttcattataaaacaaaataaatcttcaatcaattgaaaattagcaattttcagttttttaataaactggattttctaatactttaagaatcaattaatataataatctataattgggcttatttgaaaattttattatgtcatatgagtttaaatttgaaaagtcttctcaaatatcttatgaatattttgttggtacaaataatatgtgatgcaatattattaattattatttaatagaataaaaaatacaaaactgaaactatagcgttgatttgtcatacatatattgcattgtctgttgaaattgggaatccaatttctctttgttgaggccccaccccaacttacattgtttgtagaatttcttttcgaaattctctgtgttggggccccaccccaacttgcattgtctgttgaatttcttttcgaaattccctgtgttggggccccaccccaacttgcattgtctgttgaatttcttttcgaaattccctgtgttggggcccctgacttgaattgaaaagtaatacacatcagtaacatttctattttcatttatgatattatctaattattaatttataatataaaggagtatgcaattaaaatgaacaaagtccacaaacctttatatttttatttaatgctattcttctctacaactatcataggtgctcttttattatatttacctttcactggtaaaaagccaatatcttttttagatgccctatttatagcttcaagtgcatttacagttactggcctatccccagttgatataggatcacagtttaatatacttggtgaaatagtaatactattattaattcaaataggtggtctgggtatcgtgaccgtaaccctattgacactagtatttttaaatagaaagatatcaatgaaaaataggttcttgattatggttacatggaatattgacgaacctggtggtgttattaagctaattaaacacttggctatttatagtttagtcactgaattaattggtatgatttgtttgtgtttatcttttataccaaaatttggtataggcaaaggtttatttttaagcttattcacatcagtatcagcttttaataatgctggatttgccctttttaagaataacttaatagattattctagtgatccaattgtcattattacaatctcaatactcataatatttggaggtattggacattttgtcgtaatagactttattaattgtaaaaaattgagtaaattatctttacattctaaattagtcttaactacaactagtatcctaataattataggagcaattacattctttttattagaacagtttaatactatgcaaaatatgggactagttgaaaaaatcggaaattcttttttccaatcagtaacaacacgaacagcgggttttaacagtatagatatagcaagcattaacaaatctaccgccttaatgttaatgctacttatgtttataggtggtgcccctctcagtgcatctggaggaattaaaataactacttttgcagtagcgtttatatttgttctaaattatatacgtaaagaaaataatgtttcagtattcaataaagaaatatctgacaaacatataaaactatctattgttaccattaatatctcatttctatttatcagtatcattacttttatattatcgataattaatccgaacatatcattaatcaagttattattcgaagtggtttctgcatttggaacagtcgggttaagtatgaaccttaccacagaatatcatggtattactaaaataattattatattcgttatgctttgcggtaaagtaggactattaactttattaagaacatttataccaccaaaaagtcctaaaaattaccgctacactaaaggacaaatttatctataaaataactatccatctttaacaagaaatgaactagtgttttaatctattacatttaaaaaactacctaaacaggtagtttttttatttattttaggccgattaaatgtcttatgtctttaattaagtaaaatgcacaagtacacctttaaaaagatctactcaaaactaaactatacaatgatttaaatatttaaaacttattttttactacgtcaacctcaattgttgaaaagatgaatggaaatgataatttaataatgtatacttttgattgtttaaacatgtacattttctaaaattctagagataattttattgctgtgaacaacaatgaaattatcttcagtcataaatacggattttgaagttactactctttcatatttacaaaaattaataattgttatgatgaacttaaacatgaaaataagcaaaagtgaaatagctagacacatgggtgttgatataagagcagttgataaatattcaaatgtctttgatctttattttataaattcttccataaaaataaccacactcctaaatcaataggtgggtgtggttttgtgctttatattttaagaatagccatcttcaaattattttcacttgtatgatctttgatttctgtaaatccaaattttctataaaattctcttaatctatctacatcttcatactctatccaaatatatgaaccgccaaatatgttcgcaccttctaaaactttctcatatgctaaagttaacaaatcgtttccatttatggattttgtagccaatgcttcttcagaataattttttcctatttgagcaattaagtatccttgtatgattaaattgtcatttccactgtgagtttcacccttttgatataacttcttctttaacgtgtttgatattttatctaacatacgttttgtaaaaactaagggtttattgctaattgtaaaatagctaactagtatttgtttgcttttgaattgtgaaaaaactaaatgagttctagacaggttttgcctatcaaatgctatagacttatttttcaaaaataaatcaacatcgtgcgctgattcacttcctgaaattgatattgtctcaaatgaatttagtatatttaaaactgaaggtatctttcgcttaacctcttgcttatcacctgttaacaattctgaaagtgatattacttttacagtcaattacttcgatagtccttcaatagattttcaatctcacaagttgattttattttagtcgcttttatgtttgttttgttcacattacttttattttcgttaatctccattgcatctattagtttttgcgctgatttttttgtgaatttataatctgtagtaatacttattgtagccatactactcacttccttattttacttcatttgacaaccaagtatacattgtatatgttgtcttcttgtttacaatgtatcatgaaagcatcttttcaacaatagattcaataaatttttttagtgtatatgattttacacttaaaccaatttgtttcttagcataaaaacacccatactgtaactagtgtgggtgttttcaaaatgcagacagcttcttactacaatacgcaagtgagtcctctgcaaagcctaattgattaccggaaatctaattacattacaacatactagaagaaactccttatatactcaaagtttatactaaacttctctatataatctatataattttaaaattgaaaaagccccccattatgaatctcaataacacatcagcacacaataaagacgcctcccttaagtttagtcaactaatggaaggcgtcttaaattaaaatattttcatacgctctaatatttatttggaacgaatcatactcgtctatcatggaatgttctagttagtcaaaactagaaactgttttacatcattcctggcattaagggcagtatgaaatatatataaatcacatacaaaaagcctattaaattagcatcatgcattctttaaacattcaatttttttaattttttcatttcattatgaccaaatcatgaccacaaattatttcacacactaacctttataaatatatttacaataattaatatgtttatccatagaatgatttctcactgcaatgtaatgcttctctcagaatattatgttatctaataatattaataatttcatacccttacccctagttttacaattacaacctttttccacccttaaaacaaccacacccttaaattaataggtggtgtggtgtggttttgttagttaagtgggaataaaaataaccgcatcgattaagaacacggttatttagcaagaaccgcgtatatacaaatacgtttaaaatctccccagcaatcttgctatagacagcctatgatgttgcgcctttagttgtaatttcaataaagttatcttgtgattataagttaatgagacttcctttgtaaatatataactgtataaataaataaagggacgataataataacttccgtaataatagctgtgcttgctaaccaatcaagctttgcatttactaatgattgagaaaaaattacaaaatcccaaatgaaatgatatagaatcaaaggaataatgtttttgattaataaagataaacaactaaagataactccgaataaaaatgtaagtataagttgtccaatcattcctgcaagtggtagccccccaagaatattcactgaatgtagtaatgaaaaaagtatagaactaataatgattgaatatacaaccgttcttttttctaataatacatgcagaagaatccctctgaataaaagttcttctgaaaaacctactaaaaccatagttatacctactaaaatgattatggatgaatttcttccaaagtccccagtaaataaaaataaaccaagagcacataataaaataatagcaaatggcaccaaccataaactgaattcaaaagaagtatgtaacattctcaatttcaattttaaatatgccacatacactaaaatactcattattatttcagaaaaaattataactttcaccatttcaggttgaacataattaaatccaaagctcttaactaataacatccctatggccattattactatataaataattgttacagctattgcaaacttttctctttttgtcataaaagtttttcctttctgtgttgttaagttatatgtattaagtgacgggcaaaaagggtatcaattgccgggataagtgttaagttattttgccacttaacaggctatatagttcactcctactatatacgcatgtaattataatataaaaagtcacgcaaactattatacgggaacgatgaagccatctctatactacgggggagtagtaaaaaactatgttctctatataatacagaaaaccacccagtgacatgcgtgggtgaacaaggatagatgttaatagttgatgcatgtattgatattataacaaaaaaatatctattttgctaactatatcattttaaacttgcttttataaaaaatctatttgtttttacataaaaagataggcaagtaccgaagtacctgcccagaaaaggatcattcatttttttactctaactgatttctccacataagtcgcctaatacctgactagttggagcagaaccattccatgttctaataggcaagtaataacgttgcacctcccgtttatattatatccataaataatatttatataactaatttatgtaattttacaaggctcaaaattgagttctgccgttaaattcataaacatttagtatggcgttttattttcgccgtttgatgtaatgtcttctttggtgcgttctggttcaaaaagagtttctaattagtataaaatacttgcacccatatatcccactgagtgggatatttaattctggattttcagctattttcataaatctattagctgataatttgcttaatccaattttcaggccatagcctaaattccccatgcgctaagtcattttttcacatgttttaatctacgaccaatctcgaaaatcgattaaccagcctttggtgatgtcaaatttaacaatgtaatatatacactttgcatacatagttattaaaactcatcccccactgcaacacaaggcgtttcttagcaaaaaacaccactcttgaagtgatgttttttaattaaagtgcttttaaaaactcattattactttattgaccactgtataccttgttgatttgcttattaaaccgtttttgatgacctgcacttaatgtgtttactttttgttgtgctttaacacgatcattgtaactatgtgtatctttatagttatcaactaatttttgagcttctctcacatgttcacgtttaatcacgcgtttctcacgttcagttagatgtgaagaatcaatttgacttataccaaccagtgatcctgattttctaccaggtaaagcagacgtttcttcaaattcaacaacattattatgcgtgtgatttgaagttgttggtgattgatgcgttgttgtgaaatcatgactttcaccatttaatccagccaattgttttggtgcattataaataatttgttgctgagtttgacgctctaatactggcattggtacctgtgttatcgtttcagtatatgtaggtggtgttattggtttatttgttggcgtagaaataattagttgcttgtcctttccattgtcatcttcgtcatcaattaaagaaaccactgagtttctaagtttagatttagctaaaaacttttctttgatttcttccatttctttgttatatttaactttttgttcttctgaaacttcttctgataaagaattatgtttttgtttacctaaattttttttacttctttttgaaacgtcttttttagcagcttctgtgtcagattttagttttgtaatcatttccttgtttttgtgttcatcattagttaatgcaggtatattatccggtctcttttcacctatatcattaaaaaattcatcgataatagtttctaagtcttctattttaattttgcgcattctttcattagtagggagcatattctgacgttcctgttccgttgttcccaccaccatatctaaacggttatacatatctaaaactgcttttctattagttttaatgaatgcttgtcctatcattaaaatttgattttccaatttattcatttcttgatttacttgttcctgtttaatttcataaaaacgcattaaatcttcatgcttatcttcaattttctttacttctttatcaaaatcttctctatttgctttcaaactattgtacacatttatatatctttcataagttagcccgtataaataattatttctatcatatctattatagttatctacctttttctgttcttgtctaaatttattaactgcatctatttcagctaggaactttttttgatacttatcgtatacttccttgtattcaggttcttcatatcctgcgtgcctatttacagagttgtagtaaattaaatcatccaaactatctaagtatctcttggcttgctcagaactactaacatatcctccaacatttaaagatgatgatttatatacgtttgcttctccagtcacaattgcacttgcattatcgctattccaaagttgtgaagcacacaacgctcccaatgttaaaattaatacttttttcttcaactgtaaattctccttaatttaaacgtacctttccttaatttttatcgccgaaaaagaattatacaccacagatcagaaaagtattattaaatattttttaattaataataaaaaagatttaataatctgttaagattccaactcttgataacttgcacctttcaatttctcgacaaaagttggactttcatttttcattaccattaaataaatttatatacctgaatctctacataaaaaacacccaaatgggtgtttttagtaataattagctagagcttcatctatttcacgataaatattttcaagctcttctttcgctatcgacatttttgaataattcttagactttactaccatttttgctttgaaaccatacatctgtacatttcttttataatatggatctaagctgcttgtagctaaaacatttacattaagttcattaagtaaatcttttaattctttagctaacttttgatcataatattcatttgcagtgatttgtttatctgtactagctttagcagaaccctcgtatactccaattgacgacgcagctacaccaatagctaatgcggtagtcattatgcatttttttaatttcataattaatttctccttttcattcaactccctctattatatagtatctctttaaatataattattaacttattatttaaaaaaacattatctattattttttatcaaatcagtcctctaacggtatatcatccacaatcacagtatgattaggattagcgttagatacatctttcactgccttatctaactcctcatcatctccgtcccattcaccaatattaatgaatataggaatattcccgttaatatcatgcttatctatgaaagttcttttttaacttgttctaaatgcttattaaactctattcgatgtaattcttctcgctggttttgtcgttcttgacgctttctactttcaactttataaatatctacttttaaacgttcaatgactccttcatttttaactttcccactacttaacatgtacctcataacatcctgttgttcattttcagaatagtttttgatgatatctttaaacaaatttagcctatcctgagccgttttcatgtaatattcaagtttatctttctcttctataatataaagtactaatttatctaatggatatgatacagataccagcatatcgttatcattcgtgatcacatggttcatgttcaagtgatataagctttctatttgtgatctcatcgctttaattttgctattaatgactttcggattgtaatgcattaaaagttctacttcagtgattttatcattgctttcaaagtcagataccaaataaccacacctttacatatcgaatttaatatttataagtatctgaaaaagggataaatcaagttatccccctttcataaaagtttatccgcgtcgcaagcgaagggcccccgccggtacccggcgaaaaaacattttaagccaatgggcagggggctatattttttatttaaccttaaccattctcagtaactctggcacaattttgatatcgaacacgtaattcaatgcaaattggtatacaccttttaacgcttgtttctttttgttgtacataataggctcgtacttagcatatatagcatgcccaaagtcgcctacaaagatatcttgtgcatcatctgtaactactacgtgagatacattaaatagcttagttaaatcatatgcaagtgcacctaatcccacctgtgccaactctttgattaacttatcatgatgatctgtgttcatcacaatagatacactgcgtctaaatgtttgcggtatatcttttatcgcttgcttgataccatcatacattgaggtattgcttacttctttaataccttgattatatagtgataaatcttggttatctttatcaattaatccactcgcattgttcttatctaatagtaatgttgtttcatatgagacacactcattaataaatatctctttaagtagatcatctaatgttctatcagagccatgcactacactgtctgatacttctgtgtagatatgtccctcacgtctatcaaaatatttactactgccattaagtgatagctcaataccgttagtagctaacttatctttaatgtatgttagtgctggtatagattcaacatgttcatcatctgtaatagtaatcacatcacgtaatgtttgaagtagctcacgattcactaataactctttaaatacttctttacgtgcagttggtaactcttgaatattaaagttattctcactactaactaattgttttgttagggtacctacccatgtattacttgattgatttacttcattcatatttaacactcctaataattttttgttaatttgctctggtaataaaacttctgtttcagtaatacttaattgctttaacccctgttcaatcatacttacatctttacctatatccttttgatatagattggcatatcctttaatatccatatcatcaaagttagatagttgatacccaaattgttctttaaactctttcataatcttcatctcctaatttgtttttagtatgaacaactaaaccatatatacgttcgttgtttttatcttcttcatagaacgaaatgttatgaagaaagtatttgtctaataattcgtgatacttatttaatagttcttgcttatctctatacttaaacacacgttttacagattcatttgtatgatctagcacgtcttgcctctctccttttaatctgatagatgtacattttaataagttcaaaatcagcacgcttttttgtatagcgccttacaacgcgatttatatatttcgtattcattaattgaacgttcacaggtgtatgtttgattatttgatatgcgattcttttatgattaataaatatacacactcccatatctatacttgatattttaaatgcttatctgcatgttttaatttactaaactaaatgttactggtagccaatgatctatttttatatttttattctttacaattggtagccttagacctttaccatcaataagatagtacattggcggacaaatttgcatttcaattagcccgtcgcgttttaaatctgccacaatattaaacgcttcttcattccaacccatccaaaatataatattcttatggttgccactggtatatgcgccgttacctttgtatttaaaaccttgttcttcaaatacattctcaatctctacaaacgaagtgctgccattgttctttatatattctaaaatgatttgtttcattctacttctattcatgttactctagtcctccaatctatccagttactaaagcaaccacgttagatactaaaaaccactgaatttatgtttttcaataaccactgtaaacacagtgatgtcaatacatacaggctgttggttactgagttactgaaaattcacggtattttatataatcttttattaccttaattctctattatacatttctactaaaaagaaataatttatagtaactcagtaactttttgtcaaaaagactaatatgaaagtaaaaactgtggttactgaattctagaattttagtatcttttagtgacttaaacgttttttagtaactttagtatcttaggcaattttgtataactgcaagtctcttccgattatgtgcaactgaaatttacagctatgcaactcgttttaaattttccagttgcaatttttttcttactgtcacaaggggttaatccacttttgcaactatgcaaccgaaatcacacaaattagtttatataatttttgatactatttcttatttatattttggttatttacttttctactaataagttatagattttgagttgctcagttgcataagtgccctaaacccttgatataactgtgattataggtgcaacccgttttaaaattttcggttgcattcggttgcattcggttgcacctatattgcttttagcttcaccttttcatacgatttatagttttttccactttcaataggttcaatgtaatttctattgtcattaaagttgtatatcctcttagcaagttcttcattgtcatatcttcgctgtgcatcagttttccaataattctctaaataatgttcaaattgtttataaaacttgtttgaactcaatgcattatagccattttcatcacaatattctttataaaatgcgtatacaatatatttcggcacttttctaatagtccattgatcaaacatatttactttaaacccataaactggatcgttatcttctttaaatacttcaagcatttttttagatgcatcaggaatgtcaaaggtttcaaaatctaaattaattgctttataaagcacatactctagcacttgctgattttttatatagtcttctttgattttaaaattctctttaatgccattaaaattggcattaaacggtactatcaataaccttcttaaagtcccgcctgttttgtctttaaatttaggcattccattcgttgattgaataactgtacacttaaaagtcgctctatataagggtttatttttaaactcaaccaacactggatcgccagtaactacacttttaaagtttgaagaatcatcgacatacacaccaactggtacatcgtctccaattactgctgtcttgccctctaacacactcaatttaaaacgttcatcaaactcattcacttttaagctagcaatattgctataacctattacattagacaataattcttgaaatgtacctttaccattgttaccattaccaaccaaaaataatgcttttttacgtgtgtagtttccattcattgaatcattaattacttgccacaataatttaacaacctgattatcattacaagcaatctcttctatccaccgatctatattccagccatttatttcaggtactatatcttgccttacatacgatgtatctattttactggtaaatatataatcaggtgtaaatgattctagttgcttcgttttacggttaaatacatcatttttaactggtattaagtatggtgagttagttttctcttttatatctaccatattagttaaatgataaataacttcatcagctttgttgctattatgtttgggctctaaataggaaatcactcgttttataattgtagtgttctgtgtatatatcccttcatcaaattgatacatagctaacttagtattttcttcatcatcaaaaagtataaatgttaaatgctcattcaaaatatatgcacattttataggactaattgttgtaggcttacgccctcgttttccttcttcaatccaattttcttccatttttgttctttcttcatgccccaattgattcaataactgtttaatatctttactcccctgttgtataacattaaattcatctatggatttagtgcaaactgtcttttgattctttatagctttatctaactcaagctgtccccaagtcgtattacctcgtttactttcccatttatccgtaagattattgtagtttaaaaatatacgctccatttgctgtttgtttttacctgtgtaaaacgctaaataatgtaataagctttgtactgcttcgcttgaactcttaaaatatgattcatatgtgccttgtaatagatctttaattttatctttttgtttagatttcatcataatgtttataatatcttcatcagataattgcatattggtattagattcctctctcacaacatcatttactggcaaattctctttaaagtattcatcaatgagagtatttaatacttcttgattatcacaaatatcactttgaccaattgtgcatcctgtaacagtcataaaccttgctgaatcatataactctatgtctaaatctgttcttttctttttacggttatctggtagtttacctttaaagaaacaatgtaatcctgtaccacttggagacttttcacaatatgtgagttgcatcatttttagtgctaattcagaattgatttgtccttttttatcaattgcattatcaatatctaggcaaacaaaattattaccatcacttaatacaaaacctataccgctatattgctcatcaacttcatattcaatacttacactttcaaagtcacaccatgtttttttattggttgtactagctctgtaaccattaatactatatggtacttttccataattttgttgcttctcgttccattcagctcgccataatacccaattaggcactaactttaattcttgcggtatttctaattctttaactccaataattctatcttttttcttaattgccacagaatgcctcctttctaatctgatttctctgtattttcaatgcaactaatgttaaaatattaatggtatgcttttataaatttttatttttttatgcgttatcttggctttggtcggcgaaagatgacgctttttctaatgcatcaaacctcgttattaattcatcgaatttttcagtgtatagaagtagcaaatcaaacatttgatcattgtgaatacgtctctcatgatatgaaaatccttctttaataacatcgtctttatttaaggtatgatttgactcatgtagatataaatcttcaaaatgcgagccatgattatcctttaaatcctcaaacttttctttcaatatctttaaatcacacattaaatttttaatttcccaattcatttataattcctccatttcagtatcattctcaaaatcaaagttattttctatttgttgtaatgcccactcgattatggcttgtaagtgttcctcacgatttacgttttccatccattctttcttaccatctacgcaattatggatgtattccattgatgtgttataagctactgcttctaaagtattatagatgtcttgaataacttctttttgttcatttttcattttctaatcctcctgttaagtaaaagcctagtgttattaacatgccgtatacactaaaagcaatgtacatattagatattgctagtaataagattgttaacaacgatgttaaggttatataaagtaaatccaatttcattgccttgcctccaataactttttgatattgacttgtttaaagtcgttattctggatattcatgtgagcagtaagctgttccatgaattcatctacatcagactttttgaatctgtacgtagatccgaccatataatatttcataccattattaataagtaattcttcaatagtaggtttacttaaattcagatagttagccaactctttgtaagtcatgaaatatttctctttcgctaattcttccacacgtgcattaatagcttgttctaataactcgcgtacttcttgttcgtctatattaatgttgaacattttttatgcctccttacgctatttgatgtttactgctgtactcgtcgtaaatatgcttgctcacagataaaggaagtttgtattcatcaacaaataccataaattctactgtgtcatttaatacctgttgtcttaattccagcatttcatttgtcatatcttcctttttaaccatcttagggaagccaaatatatttgatactgctttgttactaattgtttgagctttgcaataatcttttttagaaatagcttcaataccattttttaaatttcccattgcttctttttgtttttctttatccaacatgtggaatacttcatattcttttagttttgtagatgtacgtaattctactaacacatcacaaatccagtcttgaaaatctaatgcctcagctttattagaccgcattacaagtcgatagatacctttttcattgataactgtgtagtcttgatattttctagctttctttttatctgatgtggtactacctttgagagtacctctcacatgttctggtaaatatttagtagcattaaatgcatctctaaaacctaatacttttgcaacgtcggtagcaattgcccaatattcattatttttctcaatgaaacgtatttctttgttattgaacagttgtttgatcattggttatgcctcctttgttctgtatacgaaaagctcttccatatcaacatttaaattatccgctattttctttgccattttcggactaggttcagcctttttattcactatcaaacttaaataagaaagcgaaatattgctatctttggcaaaactacgcaaagtatgcccattttttgctattaaaccacgtaattcaagaacttttgtttccatcaatttaaccaccttccattgttacttttttcagtaacatttttgttctacagtacaaatataaacccaaaaaggtaacaatgcaagtacattttttaaaatgttatctttttttgttacatttatgataaactcactttgaggtgattacatatgaatcaagaaggaacattagggaatgcaataaagagcgctagaaaaaagtatccgttaacactagaagaattaggcggaaaagttggagttagccacgctttcttatcacgcgttgaaaataataaaattacaccaaatgataaattacttgtcaaaatcgctaatgtattagattttaatgaaagtcaagattttttaaatgaatttagaatattagcaggatattacgataatatagatgaaaatactgctatttttaacaacttaaaatcaagtggtagattagaaataaatagatttaaaagagaaaagaagattgttgataaaccatactataaactaaattatttattcgaatgcgaaaacaaagttttctatgatataaaaacatctgaacttggcgaaaagcttgtaactattgaattaccatctgatattcttcacgatatttataaaatgataaacttagaaattataaaaaccattaaaataaattctaaacttctttatagcattgaaaaccctcaagtaattgaggagtatcaaaaagaagtggaaaaaactagaaaagaattcactgaacgtcttgaaaaatcgctctcaacttatgatattgatagtgtaatacgtgaaatatatgacgatgaatatctaatataagtaggtgaccttatggcatcatatgaaaaacgcggaaatacatggcgctatcgtatatcactaggaaaagacgcagaaacaggcaaatataaatatatttcaaattcaggttttaagcgcaaatcagacgctaaacatcacgctgaaatggttgagcgtcaattaagaaatggcgagtatatcgcaccgtccacatctacttttaaacaggttgctgacgattggcttaaacaatatgctaacgaagtaaaagtaagtagtgtcagagcacgcgagaaagccatacaccacgccatagaacgctttaacaataaaccaatacaaactatcaataaacatgaatatcaacgttttgtaaacgatataagcgcacagtatagcaagaattatgttgatagcattatagcctctacgaatatgatatttaagtacgcatatgatatgaaattaataagaatattgcctagcgaaggtattaaacgacctaaaaagaaagttagtgtggaagaattagaagatactgagatacataaaaagtttcttgaaaaagatgaattatttcaatttctggaggttgctaaaaatcaccattcaccacaaaatagctttgaagtattttgtacattagcatatacaggcatgcgtgcaggcgaattattggcattgaaatggtctgatatagactttgagaataacacaatcaatattacaaagacttattacaatccgaataacaataaaaagcaatatcaagtacttacgccaaaaactgaaagctcaatcggaaaaattccagttgatcctcatgtgattaaattacttaaaaactataaagtggatgttcaggacacatggaaaaatgaattgtatgtagataataattttgtttttactgatgtgaacggttatcccctcgtgattaaaaaactacaattatggataaaagctatacttaaaaagactgacataactaataagcaaataagcactcattcatttcgtcatactcattgtgcgttacttatagaggctggtgtgcacattaaggaaatacaagaacgcttgcgtcacaaagatataaataccactatgaacatctatgctaagattacgaactcctacaaaaaagatgcttcccaaaagtttagtaaactcatggaaagcgtctcaaaagatttattttgaaatttatatgcccaaattatgaccattaaagattacaaacactatcacagcagtgttcaatggtcattttacatcattcctggcatgccacccatgttaggttggtcattatttttttctggaattgatgctacaaccgcttcagtcgttaagaacattgctgcaacacttgcagcatgttgtaatgctgagcgtgttactttagttggatcaacgatacctgcttctaacatattaacccactcgtttgtagcagcgttaaaaccaacacccggctctgcgtttttcaaacgttctacaataacagaaccttctaatcctgcattttcagcaatttggcgaactggtgcagttaatgctttaagtacaatattcacacctgtttcaatgtcgccttcagctttaatttcacttactttttggtaaacatttactagtgcagtaccaccacctgcaacaataccttcttcaactgctgcacgtgtagaatttaatgcatcttcaatacgtaatttacgttctttaagttctgtttcacttgctgcacctaccttgataactgcaacaccacctgctaatttagctaagcgctcttgtaatttttcacgatcaaagtcagattcagtttcttcaatttgagatttcaattggcttacacgtgcatcaatgctgttttcgtcaccgtcaccatcaacaacagttgtattatctttagttacttctactttacttgcagtacctaacatatctattgatgcatcttttaaatctaagcctaaatcatcagtaatcacttgcgctccagttaaaatagctaaatcttcaagcatcgcttttctacgatcaccaaaaccaggtgcttttactgcaacagctgtaaatgtgccacgcatacggttaagcacgatatttgttaatgcatcgccttcaacttcatcagctacaattaagattggacgattagattgaaccacttgttctagtaaaggtaagatatcttggaatgatgagattttcttatctgtcactaaaatgtatgggcgttctaattcagcaaccattttatctgaatcagtaaccatatacggtgattgataaccacgatcaaattgcataccttcaaccacttcaagttcagtgttcaagccatttgattcttcaattgtaattacaccatcattgccaactttttccatagcttcagaaatataacgcccaatttcttcatctgctgcagaaatcgcacctacttgcgcaatttcatttttattttcaactttttgagaattttcatgtaacgcttcaacagcaactttaactgctttatcgataccttgtcgtaaaccgactgggttcgcaccgcttgtaacatttttcaagccttcttgaatcattgcttgagctaacactgttgcagttgtcgtaccgtcaccagcaatttcatttgtcttatttgcgacttcttgaactagtttagcccccatattttcatatggatcttctaattcgatttctttagcaatcgttacaccatcgttcgtaattaaaggtgctgtaaactctttatctaatacaacattacgtcctttaggaccaatcgttactttaactgcatttgctaattggtctacaccacgtaacattgcttgacgtgcatcttcagagaatttcaattgtttaaccataaatgataaacctccatttgtttagtcatatttcattttcgttctttacaatttatctatgaatttagttttatattattcaattaccgctaaaatatcttcttcatttaatactagatatgtttcattatctcgtttaacttctgtaccagcatattgttggaacacgacacggtccccttctttcacttcaggagtcactcttgtaccatcatttaataggcgtcctgttcctactgcaacgataacgccttcgtttgatttttctttagcactatcagttaaaacaataccacttttagttgtttgttcttgttcttttttctcaataatcacacgatttccaattggttttagcatgattgttcctccttaaaaaacctaaagtttagcacttaactttatagagtgctaacatacatttataataatcaaatttggtcaaaatttcaagtcataacctttcaattaagttttgtaacttcaagttatttaagataaaataagttataaataaatatgtggagggaaattatgacaagactatgggcatcattgctaactgttattatatatttattatcgcaatttttaccgcttctcattgtaaaaaaattaccatttgtacaatatagtggcatagaactgactaaagcagtcatttacatacaacttgttctatttttaatcgccgccacgacgattattttaattaatttaaaaattaaaaatccaacaaaattagaattagaagttaaagaacctaaaaaatatatcattccatgggcattgcttggatttgcactggtaatgatttatcaaatggtagttagtattgtatatactcaaatttttggcacacaacaaacaagtccaaatactgagcgtttaatcattattgcacgaaagattccattgtttatctttttcgtatcaatcgttggtcctctattagaagaatatgtatttagaaaagtaatctttggcgaattatttaatgcaattaaaggtaaccgtatcgtcgcatttgctattgcaacgactgtaagctcattaatctttgcattagcgcataatgactataaatttattcctatttactttggtatgggcgtcattttttcattagcatatgtatggacgaaacgacttgctgttccaattattattcatatgttacaaaatggatttgtcgttatattccaattacttaatcctgaagctttgaaaaaagccacggaacaagcgaattttatatatcacatttttattccataatataaaaaacgaatcagacacggattatcgtcgctgtgattcgtttttatttttctttttatttcgctttacaaataagaatagcatgattgaaaataccaccatcatagaacatacaattgctagccaacttttactatacgcagttgacgcacttttcttattatcttcttgttttttaactactgtaaaatcgtctttttcatgcggctcaaatgaacgttgttttgaatccggcttatcttcgggctttttcaaatctggcattgatccaatttcaccagtaattaatgcgagtacttgttcatctaaattacgatagtacctttctgatttcaatggattgaaatattggaatctaaagtaattcgattgctgttgtaatccatttaaatatgcatttccgctgaagttttgtttgcggatgatattgtagatgtcttcatcagtaacttctccataatctttacccaattgattaatttgatttaaaatatacggattatacttgtatgcaccattcgctaaggctaaaaatcgttgggatacaaaatcattaccagtaggattttgtgagtttccttgatttccatttggttgccattgaccttgattagatccatctgaagcatttgggttccatgtacccccatttttcgagccaccagaatgattggaatccccaggttgattgggatctggtgacgggttaggatttggcttattagggtctggttttggattcggattcggatttggctttggtttatctgggtctggttttggatctggttttggctttggtttatctggatctggttttggattcggttttggtttcgggttatctggatctggttttggatccggttttggtttcgggttatctgggtctggctttggttccggacctgggtttgggttatttgggtcaggttttgaatctggacttgggttttggttgtttgagtctggcttcacattattcgaattaggattagcatcacgactattcgaacctgttccttcattacccgtttgatttgattcgtgaggtgtcccagtctcattattattcatttcactatttactgatggtgaagttatattatgattcaaattagtagttggcttttctccatttaagttatcctttgcttcaactgtgtgcgttgcaagccctaaactactactacttaaaattaaaatacttgttgaaagtaacattttcttaaaccaatgatatgacatttcacgagacacctccctttttcatgtaagtattaatctaagtataataaatatgcgttgaaaatgcatttatatttggaatttgaaaatgaatattaatattcttgaaattttcgtaaatattactttacaagttgtagtataaattttatacttagtctattaagtattctttactaaagaaggagcaataattatgggtttatttaaaaaagataaaaaagcaatgacttttgacaatgcaatggaagaaagacgttcaatatataatttgaaagattcgatatcaattagcgatgacgaattagaatcaatgattgcacatgcagttaaacatgttccttcatctttcaattctcaatcaactagaattgttctcttattaaatgacaacaataataaattttgggataacacaaaagcaattttaaaagaagtcatgggagagaatcgtgatttcgagccaactgaacaaaaaatcgataactttaaacattcatacggtacaattctattttatgaagaccaagatgttgtaagtggcctacaagaacaaatgccaaattactatgataactttgcaatatggtcaactcaaacaaatgccatgcatcaatttgcaatttggactgcattagctactaaaggcataggtgcttcattacaacactataatccacttgttgatgagataacttcaaatgaatttaatattcctaaaagttggaaacttattgctcaaatgccatttggtgatattcgtgaagctgctggcgaaaaaacatttaatccagtggaagatcgcttcgtaataaaaaaataatcaatatattgtggggaatgggacagaaatgataaagaatcattagttattcattatgtgtacttaagaataggaatacatgagtaaaactcatgtataagaaatactaatttctaaagaaaaagtatttctttacgttagagcccaccccaacttgcattgtctgtagaaattggtgttccaatttctctatgttggggccccatcaactactgtcaatataacattgtagagcctagaactttgattttatgtcctgggctcgttttttgcgtttcaacataacttttagtaagttatatataagatctatcaaggatgtgatgttatgaaagtccaaatttatcaattaccgattatttttggagatagttctaaaaatgaaactcaaataacgcaatggttcgaaaaaaatatgaatgatgaagtagatgtagtcgttttacctgaaatgtggaataatggctatgatttagagcatttaaatgaaaaagcagataataatctaggacaaagtttttcatttattaaacatttagctgaaaaatataaagtcgatatcgtagctgggtcagtttctaacattagaaacaatcaaatatttaatacagcttttagtgtgaataaaagtggccagctgattaatgaatacgacaaagttcatttagttcctatgttaagagagcatgaatttttaaccgctggcgaaaacgtagctgaaccctttcaattgtctgacggtacttatgtgacccaacttatctgttatgatttacgttttccagaattattaagatatcctgctcgtagtggtgctaaaattgcattttatgtggcgcaatggcctatgtcacgacttcaacattggcattcattactaaaggcacgtgcaattgaaaataatatgtttgtcattggaactaatagcactggattcgatggtaacacagaatatgctggtcattcgatagttataaatccaaatggagatttagttggagaattaaatgaatccgcagatattttgactgtagatttaaacttaaatgaagtagaacagcaacgcgaaaatatacctgtgtttaaaagtattaaattagatttgtataaataagaagcgcccgaaataataattaacacatgtcatgactaaacatagatttatgagagatttttcataagtctatgtttatttttttataatagataactcagtaagaaccaatttcgcccttagcaaatgaatgattttcttaattatattgattattttttgaccttttccaacattagacttattcataaattttaacggtggatctcataatgaggattaactcttcccttctttattacaataaaaaaggccgcgagcttgggaggggctcacgaccatacttattattaagggaatgttttacagttattttttcaatctatttttggggatgttattaattatgaaaaaaattttatttatcaaataatgataaatcgatgttgtttacgatagcttacatgctagaaataattatctgtaatgataattaagaaaaatacatagcactgagtccaaggaaactaactctactagcaaatgttactcacttgctaattttacatggttattaagttgggatggcttaataactcatacttttagtactatacgaagataacaaatttacaatgaaagtaattaattattcatcttattttttagtgaatttgttcactgtgtcgataatccattttactaagtcactgattgttgaaatgatatcttgtgccattgaaatcactccttccttaattaagataaaaaattcttaaaattaaacaactcatcaactattttccatcacatctctgtgatctatttatattaaaacatgctaaaagcatttattttccattttttcttaactagtcgttttttattcttaactgtaaatttttttatgttaaaatattaaatacaaattacatttaacagttaagtatttatttcctacagttaggcaatataatgataaaagattgtactaaatcgtataatgacagtgaggagagtggtgtaaaattgaattattttgataataaaattgaccagtttgccacgtatcttcaaaagagaaataacttagatcatattcaatttttgcaagtacgattagggatgcaggtcttagctaaaaatataggtaaattaattgttatgtatactcttgcctatattttaaacatttttctatttacgttaattacgaatttaacattttacttaataagaagacatgcacatggtgcacatgcaccttcttccttttggtgctatgtggaaagtattttattatttatactcttacctttagtaatagtaaattttcatattaatccattaattatgattattttaacagttatttctttaggtgtaatctcagtatatgctcctgcagcaactaaaaagaagcccattcctgtgcgacttattaaacgaaaaaaatattatgcgattattgttagttcaacctttttcattatcacacttatcatcaaagagccatttgcccaattcattcaattaggcatcataatagaagctattacattattacctattttctttattaaggaggacttaaaatgaatacattatttaacttattttttgattttattactgggattttaaaaaacattggtaacatcgcagcttatagtacttgtgacttcataatggatgaagttgaagtaccaaaagaattaacacaattacacgaataatttaaatagagagtgtgatagtaggtggaaacattaaatagttataattttgttttattcgtagtaactcaaatgatattaatgtttacaatacccgctttaataagtggaatcaaatatagtaaacttgattatttttttattatagtaattacgtcattatcgttatttttatataaaatgtttgatagcgcatccctaataatattaacttcattcataattatattgtatttcgtcaaaatcaaatggtattctattttgttgattatggcttcgcaaattattttgtactgtgctaactacatgtatatagtaatttatgcatatgttaccaaaatttctgatagtatattagtaatatttccaagctttcttgctatttatgttacaatcagcttgctattttcttatataataaatagagttctcaaaaagattagcacatcatatctaatactaaacaaaggttttttaatagttatttcaaccattctactgcttactttttcattgtttttcttttattctcaaataaactcggatgaagctaaagtaataaggcagtattcttttatttttattggaatcactatatttttaagtatattaacatttgttatttcacaatttctccttaaagagatgaaatacaaacgaaatcaagaagaaattgagacctattacgaatacacattaaagattgaagcaattaataatgaaatgcgcaagttccgacatgattatgtcaatatcttaacgacactttcagaatacattcgagaagatgacatgcctggtctacgtgactatttcaataaaaatatagtgccaatgaaagataacttacaaatgaacgctattaagttaaatggtattgagaatcttaaagtacgtgaaattaaaggcttaatcactgctaaaattttacgtgcacaagaaatgagtataccgattagtattgaaataccagatgaagtaactcacattaatttgaatatgattgatttaagtcgcagtattggtattattcttgataacgcaatagaggcatcaactgaaattgatgatcctatcattcgagttgcatttattgaaagcgaaaattcagtaacgtttattgttatgaataaatgtgcagatgatataccacgtattcatgaattgttccaagaaagtttttctactaaaggtgaaggtcgtggtttaggtctatcaactttaaaagaaattgctgataatgcagacaatgtcttattagatacaattatcgagaatggtttctttattcaaaaggttgaaattattaacaactagccataaggatgtgaatgtatgaaaattttcatttgcgaagacgatccaaaacaaagagaaaacatggttaccattattaaaaattatataatgatagaagaaaagcctatggaaattgccctcgcaactgataatccttatgaggtgcttgagcaagctaaaaatatgaatgacataggctgttactttttagatattcaactttcaactgatattaatggtatcaaattaggcagtgaaattcgtaagcatgaccccgttggtaacattatatttgttacgagtcacagtgaacttacctatttaacttttgtctacaaagttgcagcgatggattttatttttaaagatgatccagctgaattaagaactcgaattatagactgtttagaaactgcacatacacgcttacaattgttgtctaaagataatagcgttgaaacgattgaattaaaacgtggcagtaattcagtgtatgttcaatatgatgatattatgttttttgaatcatcaacaaaatctcacagactcattgcccatttagataaccgtcaaattgaattttatggtaatttaaaagaactgagtcaattagatgatcgtttctttagatgtcataatagctttgtcgtcaatcgccataatattgaatctatagattcgaaagagcgaattgtctattttaaaaataaagaacactgctatgcatcggtgagaaacgttaaaaaaatataataagataataaagtcagttaacggcgtattcaattgtaaatcttgttggattttaacaagataactagcaaatgcactgtatagctggctttttaattttaataacaaaattaaatatgacgcgtgaattaaaaaatgatgtaacgtttctttgtatacctattcctattactacataatttatcaatttctatttcactctacaatcctatggcgcaatttttaacaaaatgtactaaatttgaaatcgacagtttccttaaataaaatgctacaatttcctaccccgtgaatcttattttgtttaaaaaaacagtgtagcacaagattcaacttgtttcctacactgttttataaatgaattatttaaaatgcttgttcaacctcttgtaatgttggcaaactattaatagcaccatacttcgttgtcactattgcagcaacgcgattgctaaacgctaaaatttcctcaccttcattttcaaataactgtgttaaatttaacacatcggttgctaaaatcctgctaataactgcaccaataaaggcatcccctgccccagttgtatcaacaggttttaccttatagccactatgataatgattaataccatttttcaaatatacggcagcaccatctgctcccttcgtataaatgactacagtaacattacctgtaaataatgattgaatggcttcattttcatcatgaatacctgtaataaattctaattcttcatctgaaacttttacaatatgcgccaatggcaaaaaggtatgaatagtttttcttaaatcttcagcgttatcccataatggcaatctaacattaggatcaaatacgacagtaccatttgcatttaatgttttggtaatcaattgataatgtgcatttctcatcggactatcgaccaaatcaacagaacaaaaatgtactacatcgttttcattcacatcaatatcattcacaaaacttggttcaaataacatatcagcagagggcttacgataaaaagaaaaatctcgctcacccgcttcagtcaaactcacaaaagctaacgcagtgtttgcttcattagtgcgatacacttttgatacatctacaccaatacttgatatcgtttcaataatgctatctccaaatgcatcattacctaattgtgtaatcatatacgcttgttgtcctaacttttgaactgtacaagctacattacaaggtgcgccaccaatttgcttcgtaaatgtttgaacatcttttaaattcgcatttgtaatatttggaataaaatcaattaacgcttctcctattgaaaatagacgtctcatttatgttcatcctttaaatcgtatttagtaaattgtaaatatacttgccctgattctgtcgatgttttaatacctagtgcgtcttctgtcgggaaaattcgagatgtcaaaacacgttccccatcattacagaaaatttctatactagatgtatcaacaaaaatttgtaattgctttaatggcgtgtctaatatcgtactacgcgtcgtaccttcaacatttgtaggcaataaaccactgtcgctgcgatctaatgttattttattttcacgcttgttataagcgattaatgttgaagaagtcttagacgtacgtaattcaaagtacacttcggtagcatcattatccaaaatatctatgattaattcatactgtttaccttcatacggatgtaattttcgagtaaatttatttgcgtagcctaatgctgtctctttattgtgacgtaatttttccaacgctggatatggacgttgcttaagttgaccattttctacatttaatacacgaggaattgttaagcaatgggcccatccttctttatcagtaggatattctatttccggtaaccccatccatccaattagtactcgtcggcctttttcatctaaaaatgtttgaggtgcatagaaatcaaagccattatcaagctcgacaaaattttcatgttcataagttaacttttcaatatcaaactttccaagtatataaccactttgataaatatttttgaactgattgccttttggttcaataccttgtggacaaataagtatgacatcttgattatctacattaaagtaatctgggcattcccacatatatccaaaatcatctaactctgtatttatttcacctaaataatgccaattaattatatcttcagtattataaagtaataatcgaccttgctgatcattattttgtgcgccaatgattgcataatatttctcaccatatttaaaaactttaggatctctaaaatgactcgtatatccttctggttgctggctaattactggctttggaaacttttcaactgaaccgtcttctttcaatcgtgcgatcatctgactcgcatgtcgttgccaatgattatctcgatgatttcctgtgtacatataatataaatgcccgttatattcaaaagcgctaccgctataaacaccatggctgtcatatttagtatctggatttaatattggcccttcagctttaaagtttattaagtcatcactcgtgtagttataccaatactttaaaccatgtactgcgcctaatgggaaccattgatgtgaaacataatacttccctttataaaaaataagtccgttgggatcatttaataaacctgtttctggttgtatatgaaattgttgacgaaattttgattgatcaacttgttgttttaatgttttaaaatactcagtatcaacatcctcgattcgttgataacgttcttctctagtccattcggtcataatatttacccagtcctccttttataatttatgctgttaacaatttatattctattatagcaaattttacctatgttctttaacttttaacctatccatttatacttatatggtatcggttccacatttattttaaaaaatacagcgtctaaatattaacatctactgtgacgctatatggcatatcttgctttttaagcatctgttgtatctcttccatcgcgcattggccagcttcaaaataattataatgaattgtttttatcgatggagacactaattgtgtcattgggtcaccaccaaaaccatatatttgatgtggtttcataacatcttttttatcagaataatatttataggcagctaatgcaatcgtatcagttgctccaacaaccgcatctacttgctccacattttccaaaacatttgcaacatctttttgtgcttccacataagtaaaatttgtttcatgtatattaggtttaatttggtatttggctaactggtcaagtaaaccacgttttctatgtataccaactgcaatatctttttcactcacactaaacacttcaatttgttgatatccctgttgaccaatccattcacctataatttgacctgctttataatcatcatgcacaatactatgaagttgttcatgttgttgaccaacaataacgattggtacattcattttattaatgacttctatatgtctctctgttatgtctgtagccattaaaacaataccatctactttactgcgtgctaatgtttcaagcgcttgtatttctgcttcgatatttaatcctgtgtaattcaaaattaattgtgattcatatttttggcattgttttgccaatcctttgattgtttcatctactgcatatgaattcattctaggtataatggcaccaataaggtgtgtttgtctcgctcttaaactttgagcaaattgattcggttgatagtcatgttctgctataatttttgttaatttttcacttgtttttttactgacagatccattatttaaaaatctagatactgtactttttgaaacgcctgccaatttggcaatatcagatatatttttcatacttattcacctatcattatttgtgacacttggccttattttagcatatgtgtaaccgctttaaataatatttctgcttctttcataaaaagatttcaaaataaaacttttgtataacaaaatgtcccaacatcaacctttagttaaatgtcaggacaatgaatattctatgtatatattttaatatcgaatatgtttattgaatctatttagctcaccttcaaagtaagcatgttcaccgtgaacaatcttgtctaatcctatattcgtttcttgttccgtaacagataatggtgtaattgatttaattactttcgcaataataaacgtcatgacgatactaaaaattacaactgctgttacacataatatttgtacaagtataatatgtatgtcaccagtataaataaagccattctcaatttcaggatttgcctttttactttggaaaaaagctgttaatactgcaccaataataccaccaacaccatgaataccaaatgcatctaatgcatcatgatattttagctttaccttgatgtaattaataacgatatagcaacagataccgccgatcattgccatgattgttgcacttagatatgtcacgtatcctgctgcaggtgtaatgacaactaaaccagctaatgcacctagtaataatcctagtaaacttgtagtctttttaaaaatatattctagaattaaccaacctatagcacctgcactggctgaaatgacagtatttgtaaatgcaagcatcgcaatattatcaaatgtaaaagcactacctacattaaatccataccaaccaatccacacaaatataccgccaatcaacgtaatgataagattatgtggtgttgattcagaatgtttgttcccttttccaatcataatagctaatactaaaccagaaacacctgatgtaatatgaacaacagtacctccagcgaaatctaatacaccgagtttgttaatccaaccgccgccccaaacccaatgtgctactggactgtatacaagagcagtccatattactacgaataataaataaggaataaacttcattttctcagcgattgaaccagataaaatagaaattgcaatcgtacaaaacatcatttgaaataacataaacaaagcgaaaggaatatgtggactaatatcttcctgagtcgcaaaacctacatgattaagaaaagtatattcccaatttccgaaccataaattcccattcccaaaactaattgtaaaaccaactgttatccatacaaatgtaacaagcacaattgctgccatactttgcatgacagtatttagcgcatttttagattgaactaacccaccataaaataaacttaatcctggtgtcattagccaaactaataatgtacacaaaaacataaatatcgtatcgttaagattcatacttaccactcctttgttttcataataatctgacaatttataaaaagcaaaaatgcgtaaagttttattacatcttttggaataaaatgtatcacgctatataaaattaatttcgtgaactaaaaccaaaaaagactacttactcgcttttaaagtagcggaagtagccatagaatctaatatctattttattattaaaatgataacgttaaactttttgaattgtaatcgtccatgaagcattatcaatttgttcatagtttgttacaggatatccattttctgcagcccaatttggaatagcttccgtcgcttgtgtacagtcaaaatcaatttttaattcatctccagattgcaatgttgccattttcttttgcgcttcaattaacggaaatggacataccattcctactgtacctaattcgtgtatcataattatttctccttttccaatcacttttatttgatcaacatcatttgcataataatcttctatactatttgcgtttgctgttggacctttgcagattgttgttgtacttttttcattggacgaacaaagataaaatgactcattgtccataccccaactatcatcgatgctagcgcaatccatccttgccaagtcatcgttgccgtttcaaccaaaccgttaccgatagaacaaccaccagcaactgacgcaccaaatcccatacatatgccaccaatagcactgtttcgtattgtaatcttgtctggcaatcgccatttaaattctcttgatcctctagctgcaatatatgaaccaatgaaaattcctagaactaaaaagacaccccaatcaataaatttagtttcacctgtaatcaaaaagtgtactaaatttgctgatggcgttgttatacctaaaccgtcatttcttccagttgatgcactcattggccaagctaagagtgcgataagtccaattgcaattgcagcaataaatggatggtatcgtttttcgaaaaggtaatatctaatacctgtataacgttgctttagttttggaacagcaactcgaactttcttattattgagtgttcttacaactagaaaaatggtgattatagttaatataacgactaatccccaaaacggaatgccagttgtttgagacatatcactatttatattcgttggttgattaattttatccattactggctttaaaatccctgttttagtgattgctgcagtaacagcatataatactaatgcaatccaactaccaattagcccttcaccagcgcgataccaagtacctgttgcacaccctccagccaatactattccaattccaaaaataaaagaacctataactgttcccaatattggaaaactatgtgcaggaatttgtaaaatacctgttgccgtcaaaatcaataatcctatactttgaatagtaatagcgattaataatgcatagaacatcttattattcttttgcacatacatatctcgaaagccacctgttaaacaaaatcttgttctttgcatcacaaaacctaagagtcccccgacaattaagccactaaaaatcatccacatcgtcctaaccccctaatttccgataagtttagtatgtattataggcgatgattttcttgttttcaacctcatacacaatatttttgatatttatattatgttcatataagaaatgcgattaattacgattcatcattatatctctacgtgttaatttattaacctatactatatttatcaacacaacagttttccctttcattttcaaacacaacagaaaaagcctgagacatacttagtcccagactgttctataattaattaaagatataacaaggttaatcattcaaagctaacatcacatttattcactgtaatttttcataaagaataataacgactgtaattctatacctaagtcaatttgatgtacttgcacatctgaaggcgtattaattctaccaggagtgaagtttaaaatacctttcacaccagcttggacgagttcatctgcaactttctgtgcaactatttctggtgtagttagaatcacaacatctatttcttccttcttcaatgttgttattaattcatcgttatcttttacaataacgttccctattttctggccaataacatcttcttttacgtcaaacgcttctgtaatcgtcatatcgtcatgtattgaaaagttatatgtgagcaaagctttccctaggttcccaactccgacaattgcgattttgatcatgtcactctcgcttagttcagatttaaagaaatccaataaactatctatattatatccgtacccttttttacctaattcgccaaaatatgaaaagtcacgacgaattgttgccgagtcaatttgtaacgcatcgctaatcgcttttgaatttacacgatctatacctttagattttaatgaactgacaaatctataatataacggcaaacgttttaaagttgctcgaggaattttaacttggtcactcattcgctatttcctccttcgtgtttgaatgaattatatctatgtattcaaacgagttagagcgtaattgttagattattaaaaaacaaataattgattacaatgaatacctaaatattatacattattgaattttaaaaataaatatcttagtttcaagacggcgttttatactgtaaaatggttattaatgtaataattacgacttttatcataagttaataaaatttgcgaaagacgaaaggtgaagatcgaatgatacttttacaactcaatcatatatcaaaatcgttcgatggtgaagatatatttactgatgttgattttgaagtaaaaactggtgaacgaattggtatcgtaggaagaaatggcgccggtaaatcaacattgatgaaaattatagctggcattgaaaactatgattctggaaatgtgtcaaaaattaaaaacttaaaactaggttacttaactcaacaaatgactttaaattctaatgcaacagtttttgaagaaatgtcaaaaccatttgaacatattaaacgaatggaaagcttaatcaaagaagaaacagattggttatcaaaacatgcaaatgattacgatagtgatacatataaaacacatatgtcccgttatgaatctttatcgaatcaatttgaacaattagaaggatatcaatatgaaagtaaaattaaaacagtacttcacgggttaaattttagtgaagaagatttcaataaacctatcaatgattttagcggtggccaaaaaacacgtttatctttagctcaaatgctattaaatgaacctgatttattacttttagatgaacctactaaccacttagatttagaaacgacaaagtggcttgaagattatctacgttattttaaaggtgcaatcgtcatcatcagccatgatcgttactttttagataaaatagttactcaaatttatgatgtggctttaggtgatgtcaaacgctatgttggtaattacgaggaatttatacagcaacgggatttatattatcaaaaacgaatgcaagaatatgaaagtcaacaagcagaaataaaacgattagaaacttttgttgagaaaaatattacccgtgcttcaacaagtggaatggcaaaaagtagacgtaagattttagaaaaaatggaacgcattgataaaccaatgttagatgccaaaagtgcaaatattcaatttggttttgaccggaatacaggtaatgacgtcatgcatgtaaaaaatttagaaatcggttatcaaactgcaattaccaaacctatcagtatagaggtctctaaaggcgatcatatagcaatcattgggccaaatggtattggaaaatcgaccttaattaaaactattgctaaacaacaaaaagcgcttaatggcgatattacttttggcgcaaatttacaaattggttattatgatcaaaagcaagcagaatttaaatctagtaaaacgattttagattatgtgtgggatcaatatccgttaatgaatgaaaaagatattcgtgcagttcttggacgtttcttatttgtacaagacgatgttaaaaagataattaatgatttatctggtggtgaaaaagcacgtttacaactagcactacttatgttgcagcgtgacaatgtacttattttagatgaacctaccaaccacctcgatatagattcaaaagaaatgttagagcaagcactccaacattttgaaggaacaatactatttgtttcccatgatcgttactttattaaccaattagcaaacaaggtatttgatttaacaattgatggcggaaagatgtatttaggagattatcaatattacattgaaaaagttgaggaagcggaagcgttgaaagcgcaccaagaagaacagtcagttaacgtacaagcacatgaaaagtctatggaacaatcgtcgtatcataaccaaaaagaacaaagacgtgaacaacgtaaacttgaacgacaaatatccgagtgtgaaaatgaaatagaaactttagagactactatcttacaaatagacgagcaattaacccaaccagaagtttataacaatccacaaaaagcaaacgaattagctatccaaaaacaagatagcgaacaaaaattagaacacgctatgtctaaatgggaagaattacaacaaaaactataaaaatatacataactctaactgtaaaatcgctatagttagagttatttttttacaaattttaaatttttttattcacaataaaaacgctgatattatagctatccacagagttaccctagttatccacaagtaaattaacactaatcaaccattcattttctattttcccacctgatatccacaataaatgacgttatcaacaccttttatccacaagttatacactttttgttgataagtacgcatgttctctattgacattgtttttatcaaaattcattgttaagacattttctttatgaaataataataatattgaagtatatttttattattattcaaaataaataaggagatagttatgagcacaaatcaaacatttttaatatttgttatagcaattattatacttacatctgtaataggaattgttggacgatacatgagtcgtcaacgtctttttaaatctatggaaacattatggcaaacgatttctccattagagtcttttatcagaccgaactcacatttcgactatgagtataagctctacaaggataaatttgaatcacattcattagttgatgataaaacttggtccgatttaaatatgaatgcaatctttcataagatgaattataatttaacagctattggggaaatgaaactatatgcctgtttacgtggaatgctttcaattacgaacaaatcattacttagtttatttaatgataatgctgaatttagaaaaaacgtaacatatcatttagctttgattggtaaaactgtttatccaacatttccagaccaaatcacaccggtaaaacgtcataatatattgtttctatgcccgtttttaccagttatctcatttgcagttatatttattaattcacaagttggtattttattatttcttatgagttgcctatttaatatcattttatctgcaactttaaagcgtacatatgaggatgacttaaagtctatcttttatgcatccaatgttttaaaacaaggctatactatctcaaaaattaaacatgctccacaacccgaagtcaattttaagcaatttagaacagcacgtcatttaacgagtgttttagctgaagttaatgatgaagatatcggagctatggtaattaaactagttaaacttattttcatgcttgattatgttttattccattcaattcaaaaaagctatacaacacatatgaatgagctaaaaaattgtttcgattacatagctgaattagataatcattatgcattagcaatgtatcgtagaacgctagaatgctatactgaaccacaaattgatgattcaaatgatggcatagtattctctgagttaacacatccactcatagcagatgcagtagccaatgatttctcactatcacaaaatatactgttaactgggtctaatgcttcgggtaaatcaacatttatgaaatccatagcaataaacattattcttgcatcggctatacaaacagttaccgcaagcaaatttgtatatcaacctggaattgtgttcacgtcaatggcaaatgccgatgatgtgttatcaggcgatagttattttatggctgaattaaaatctattaagcgtattgttgaaattcctgataatcaaaaaatatactgctttatcgatgaaatttttaaaggtaccaacacaactgaacgaattgccgcttcagagtcagtactatcatttttacatgaaaaatctaactttagagttattgcagcaacacatgatattgagttagctgaactcttaaaacaacgttatgaaaattatcacttcaatgaggtaatagaaaataataacatccattttgattacaaaattaagcctggcaaagcaaatacacgtaatgccatcgaattattaaaaatcacttcatttccagcaaaaatatatgaacgagcaaaagataatgtttccaatggttagtatgaatcttgaacatcaatcaatgttcaagtcgcaacattgttatattggcagtctttgactaaatgaaaatgcgcttgtaataagttttttcaatactagtcaggggccccaacatagaagctggcggaaagtcagcttacaataatgtgcaagttggcggggccccaacatagaagctggccgaaagtcagcttacaataatgtgcaagttggggtggggccccaacatagagaaattggaacaccaatttctacagacaatggaagttggggtgggacctcaacataataaatcattagtggttctttatcttttctgtctcaatcccctaattgcaatataaaaacgtcagctatcacatgacagaagacagtgaacagtttcaataatgttcatcgtaatcatgttaataactgacgtttattttattctgcagaatactcttctaaatctatattgctgtgcccatttaatgctaaatcagcaaatcgaccttgctgatacaaatagtggccggcaacgcctatcattgcagcattatctgtgcataatttaggacttgggatagttaattgaatgtcattgactttgcattgatccgctaaagattgacgtaatcctttattactcgccacgccaccagcaacaattaatcgctgaacaccatattctttacaagcttgaatagctttaaacgtaagtacctctacaacactattttgaaagctcgttgctacgttagcttcaatgattggaatgtttttttgtcgttgattgtgaagttgattgattacggcacttttcaacccactaaaactaaagtcataactatctttatccaaccaaacgcgagggaatgaataagtatcttcaccttcagcagccaaccgatcaacttgtggaccacctggataatttaaaccaattgttcgtgccactttatcataagcctcacctactgcgtcatctcgtgtttcaccaatgacttcaaatgttaagtgatctttcatataaactaattcagtatgtccacctgaaacaataagtgcaattagcgggaatgttaatggctcttctatgtgattagcatatatatgtcctgcaatatgatgaactggaataagtggcttatcgtaagcaaatgccaatgctttggctgcattaacacctattagtaacgcaccaattagtccagggccttctgtaaccgctatggcatcaatatcttccattgatacatcggcatccactagagcctcgtttattgttgttgttataccttcaacgtgatgtctacttgccacttcgggaacgacaccgccaaatcgtttatgactttcaatctgacttaaaactgtatttgataaaatatctctgccattttttataacactaacgcttgtttcatcacaacttgtttcaacagctagtattaatatatctttagtcatttaaattcacccacataaccattgcgtcctcaccttcaccataataatttttacgtttaccaccatattgaaatcctaaattttcatatacatgttgcgccactttattattaactcttacttctaaactcatcacatcacaagtgtgacttgcatagtttattccgtattttaaaagcatttgacctaaaccatagcctctataattatcatcgattgcaactgtcgtaatttgagcttgatcgataacaatccataaacctaaataaccaataatttgttgttcaaattctaagacaaaatatttcgcaaagttattttgctctatttcatgataaaatgcgtcaattgtccaagaactatcattgaaactccgacgctcaatatcaaagacttgtggcacatcttctttggtcatctctctaatgtttaattgttcttttgactgttgatccaatttcgttccgcctcagctaatttatggtatttaggagtaaatgtatgtacgtctgaaggtttatctatcaattgatacatgactgatgcatttggtagctgcgcaatcacatcaccttgcaattcatcttgtaattttacagtatctttcccaatataaataaatggttggtttaaatcttctaaaaaagctcgcaatgcttctatcgacatatattgatcttctaaaatagtcactaattgaccattttgccactggaatatgcctgtataaactgcttgtcgtcttgcatcaaacacaggaaccaataatttatcagtatgatcgattgttgctgccaatgcctttaatgatgaaacaccatataatttaacatctaacgcatacgctaatgttttagcaacagtaacaccgatacgtaagccagtatatgaaccaggaccttcagcaacaataatcgcatctaattgctgtttagttattttgctctgctcaaacagctgactaatcgcaggcattaattgcactgaatgattttgtttagaatccgtagttatttcagctaaaacttcatcgttttgcatcaatgctactgataatggttgattcgatgtatcaatgagcagcgaattcatggataattgcctccttaatttgttcataatgttctccttgagcgaacaactcaatttgtcttgtattttcagatattgttgaaatgttaatagataaatgcgtcgctggaagtaaatcttttataaattgactccattcaataacagtaattgcctgatcttcgaaaaattcatcaaaccctaaatcttcatcagaatcttctaagcgataacaatccatatgatgcaattttaaatttttacccctatatgatttaatgatgttaaatgtcggggaattaatcgtacgtcttacaccaagagcttttcctataaattgcgttaacgttgttttacctgctcctaaatctccgttaagtaaaatcaaatcaccacttttcaattgctcaactaaaaacatagcaaattgattcatttcatctaaattatttatctttatcaatgttgattctcctatattatgcttttcattcataaaaatgattatccattgttcaatcgtatctaactttatatttaacctttatattgtaacaaatttcaacttaaatttcttatctttgaaacagattatctcttcaaagttaattgtaagaaaatttaaaatatttgttgacatactaaagcagatatagtaaattaaatttatcaaatttttagacaattctaactattaaagtgatatataccattcacggaaggagtataataaaatgcttaatcaatatactgaacatcaaccgacaacttcaaatattattattttattatactctttaggactcgaacgttagtaaatatttactaaacgctttaagtcctatttctgtttgaatgggacttgtaaacgtcccaataatattgggacgtttttttatgttttatctttcaattacttatttttattactataaaacatgattaatcattaaaatttacgggggaatttactatgcgaagcgacatgatcaaaaaaggagatcaccaagcaccagcaagaagtcttttacatgccacgggcgcgctaaaaagtccaactgatatgaacaaaccatttgtagctatttgtaactcttatattgatattgttcctggacatgttcacttgagagagcttgcagatatagctaaagaagcaattagagaagccggtgccattccatttgaattcaatacaattggtgttgatgatggaatagctatgggacatatcggaatgcgatattctctaccatcacgtgaaattattgcagatgcagctgaaactgtaattaacgctcattggtttgacggcgtattttacattcctaattgtgacaagatcacacccggtatgattttagcagccatgaggacaaacgtaccagctatcttttgctctggtggaccaatgaaagctggcttatctgcacatggtaaagcattaacactttcatcaatgtttgaagctgtaggtgcttttaaagaaggatcgatttctaaagaagaatttttagatatggaacaaaatgcctgccctacttgtggttcatgtgctgggatgtttaccgcaaattcaatgaactgtttgatggaagttttaggtctagcattaccatacaacggtactgcacttgcagtcagtgatcagcgacgcgaaatgattcgtcaagcagcttttaaattagttgaaaatattaaaaatgatttaaaaccacgtgatatcgttactcgcgaagcaattgatgatgcatttgcacttgatatggctatgggtggttcaacaaacacggtactgcatacgttagccattgccaatgaagctggtattgattatgacttagagcgcattaatgctattgccaaacgcacgccatatttatcaaaaatagcacctagttcatcgtattcaatgcatgatgtgcatgaagctggtggcgtcccagcaattattaatgaattgatgaagaaagatggcacgttacacccatatagaatcacagttactggcaaaacgttacgtgaaaataacgaaggcaaagaaattaagaactttgatgtcattcaccctcttgatgcaccatatgatgcacaaggtggtttatctatcttatttggtaatatcgcccctaaaggcgcagttattaaagttggcggcgttgatccatctatcaaaacatttactgggaaagcaatttgtttcaattcgcatgatgaagctgttgaagcaatagacaatcgtaccgttcgtgcaggccacgtcgttgtcattagatatgaaggacctaaaggtggaccaggtatgcctgaaatgttagcacctacttcctcaattgtaggtcgtggcttaggtaaagatgttgcattaattactgatggtcgtttttccggtgccacaagaggtattgcagttggtcatatttcccctgaagctgcatctggtggaccaattgccttaattgaagatggagatgagattactattgacttaacaaatcgtacattaaacgtaaaccagcctgaagatgttctggcgcgtcgccgagaatctttaacaccatttaaagcgaaagtaaaaacaggttatctagctcgttatactgccctagtaactagcgcaaatacaggtggcgtcatgcaagtgcctgagaatttaatttaatttatttttatattggagatggttaaaatgtctaaaactcaacatgaagtaaaccaaaatattgaccctttaaaaatggctgaatcacttgaacctgaacaactaaatgaaaaaactttaaatgacatgcgttcaggatcagaagtgctagtagaagctctacttaaagaaaatgtggattatttattcggttatcctggtggtgccgtactacctttatacgacacattttatgatggtaaaatcaaacatattttagcaagacacgaacaaggtgctgttcatgctgcagaaggttatgcacgtgtatctggtaaaactggcgtcgttgtagttacaagcggtccaggtgcaacaaatgtaatgacaggtattacggatgcacattgcgactctttacctctagttgtattcactggacaagttgctacaccaggtattggtaaagatgcattccaagaagcggatattctatctatgacttcaccaattacaaaacaaaattatcaagtgaaacgtgttgaagatatccctaaaatcgtacacgaagctttccatgtagctaattctggacgcaaaggtcctgtagtgattgattttccaaaagatatgggtgttttagctacaaatgtggatttatgcgacgaaatcaatattccaggttatgaagttgttacagaaccagaaaataaagacattgacactttcatctcaattttaaaagaagcgaaaaagcctgtcgtattagccggcgcaggtattaatcaatcaaaatcaaatcaattattaacacagtttgttaataaacatcaaatcccaactgttactactttactaggtctaggtgctgtaccttatgaggatacactatttttaggtatgggaggtatgcatggttcttatgctagtaacatggcattaactgagtgtgatttactcattaatttaggtagccgcttcgatgatagattagcaagcaaacctgatgcctttgcacctaacgccaaaattgtacatgtagatattgacccttcagaaattaataaagttattcatgtagatttaggtattattgcagactgtaaacgatttttagaatgtttaaatgataaaaatgttgagactgtagaacacagtgactgggttaaacattgtcaaaataataagcagaaacacccatttaaacttggtgaagaagatcaagtattttgtaagccacaacaaacaatcgaatatatcggcaaaattacaaatggtgaagcaattgttactacagacgtgggacaacatcaaatgtgggcagctcaattttatccatttaaaaatcacggacaatgcgttacaagcggtggtttaggaacaatgggattcggtattccttcgtcaattggtgccaaattagctaatcctgataaaacagtcgtatgtttcgtcggtgacggtggtttccaaatgacaaaccaagaaatggcactattacccgaatatggtttagatgtcaaaatcgtactaatcaataatggaacattaggtatggttaaacaatggcaagataagttctttaatcaacgcttctcacactcagtatttaatggtcaacctgattttatgaaaatggcagaagcatatggcgtcaaaggtttcttaatcgataagccagaacaactggaagaacaattagatgcagcgtttgcttatcaaggaccagctttaattgaggttcgtatttcccctactgaagctgtaaacccaatggttccgagtggcaaatcaaatcatgaaatggagggcttataatgacaagaattcttaaattacaagttgcggatcaagtcagcacgctaaatcgaattacaagtgcttttgttcgcctacaatataatatcgatacattacatgttacacattctgaacaacccgggatttctaacatggaaattcaagtcgatattcaagatgatacatcacttcatattttaataaaaaaattaaaacaacaaattaatgttttaatgattgaatgctacgaccttgttgataacgaagcttaattttaagacaaaggcaatgatgcgctaattagttatagatatatcataggctgctagttaacatctgccactattacaaagttatatttcagaattttcgaaaaacaaaacatttaattatttggaggaatttattatgacaacagtttattatgatcaagatgtaaaaacggacgctttacaaggcaaaaaaattgcagtagtaggttatggatcacaaggccacgcgcatgcacaaaacttaaaagacaatggatatgatgttgtcatcggtattcgaccaggtcgttcttttgacaaagctaaagaagatggatttgatgtgttccctgttgcagaagcagttaagcaagctgatgtaattatggtgctattacctgatgaaattcaaggtgatgtatataaaaacgaaattgaaccaaatttagaaaaacataatgcgcttgcatttgctcatggctttaacattcattttggtgttattcaaccacccgctgatgttgatgtatttttagtagctcctaaaggaccgggtcatttagttagacgtacatttgttgaaggttctgctgtaccatcactatttggtattcaacaagacgcttcaggtcaagcacgtaatattgctttaagttatgcaaaaggtattggtgcaactcgtgcaggtgttattgaaacaacatttaaagaagaaacagagacagatttatttggtgaacaagcagtactttgcggtggtgtatcgaaattaattcaaagtggctttgaaacattagtagaagcgggttatcaaccagaattagcttattttgaagtattacatgaaatgaaattaatcgttgatttgatgtatgaaggcggtatggaaaatgtacgttactcaatttcaaatactgctgaatttggtgactatgtttcaggaccacgtgttatcacaccagatgttaaagaaaatatgaaagctgtattaactgatatccaaaatggtaacttcagtaatcgctttatcgaagacaataaaaatggattcaaagaattttataaattacgcgaagaacaacatggtcatcaaattgaaaaagttggtcgtgaattacgcgaaatgatgccttttattaaatctaaaagcattgaaaaataagatagacctacaatgaggagttgttaaatatgagtagtcatattcaaatttttgatacgacactaagagatggtgaacaaacaccaggagtgaattttacttttgatgaacgcttgcgtattgcattgcaattagaaaaatggggtgtagatgttattgaagctggatttcctgcttcaagtacaggtagctttaaatctgttcaagcaattgcacaaacattaacaacaacggctgtatgtggtttagctagatgtaaaaaatctgacatcgatgctgtatatgaagcaacaaaagatgcagcgaagccggtcgtgcatgtttttatagcaacatcacctattcatcttgaacataaacttaaaatgtctcaagaagacgttttagcatctattaaagaacatgtcacatacgcgaaacaattatttgacgttgttcaattttcacctgaagatgcaacgcgtactgaattaccattcttagtgaaatgtgtacaaactgccgttgacgctggagctacagttattaatattcctgatacagtcggctacagttaccatgatgaatatgcacatattttcaaaaccttaacagaatctgtaacatcttcaaatgaaattatttatagtgctcattgccatgacgatttaggaatggctgtttcaaatagtttagctgcaattgaaggcggtgcgagacgaattgaaggcactgtaaatggtattggtgaacgagcaggtaatgcagcacttgaagaagtcgcgcttgcactatatgttcgaaatgatcattatggtgctcaaactgcccttaatctcgaagaaactaaaaaaacatcggatttaatttcaagatatgcaggtattcgagtgcctagaaataaagcaattgttggccaaaatgcatttagtcatgaatcaggtattcaccaagatggcgtattaaaacatcgtgaaacatatgaaattatgacacctcaacttgttggtgtaagcacgactgaacttccattaggaaaattatctggtaaacacgccttctcagagaagttaaaagcattaggttatgacattgataaagaagcgcaaatagatttatttaaacaattcaaggccattgcggacaaaaagaaatctgtttcagatagagatattcatgcgattattcaaggttctgagcatgagcatcaagcactttataaattggaaacactgcaactacaatatgtctctagcggccttcaaagtgctgttgttgttgttaaagataaagagggtcatatttaccaggattcaagtattggtactggttcaatcgtagcaatttacaatgcagttgatcgtattttccaaaaagaaacagaattaattgattatcgtattaattctgtcactgaaggtactgatgcccaagcagaagtacatgtaaatttattgattgaaggtaagactgtcaatggatttggtattgatcatgatattttacaagcctcttgtaaagcatacgtagaagcacatgctaaatttgcagctgaaaatgttgaaaaggtaggtaattaattatgacttataacattgttgccctacctggtgatggaatcggcccagaaattttgaacggacctctatcattgcttgaaattataagtaataaatataactttaattatcaaatagagcaccacgaatttggtggtgcctctattgatacattcggcgagcctttaactgagaaaaccttaaatgcgtgtaaaagagcagatgctattttactgggtgcaatcggtggacctaactggacagatcctaacaatcgaccagaacaaggattattaaaattacgtaaatcattaaatttatttgcaaatatacgccccactaccgttgtcaaaggcgctagttctttatcacctttaaaggaagaacgcgttgaaggcacagatttagttatagtccgtgaattgacaagtggtatttattttggagaacctagacattttaataatcacgaggccttagattctcttacttatacaagagaagaaatagaacgcattgttcacgtagcatttaaattggccgcttcaagacgaggaaaactaacatcagttgataaagaaaatgtattagcttctagtaaattgtggcgcaaagtcgtaaatgaagtgagtcaattatatccagaagtaacagtaaatcacttacttgttgatgcttgtagtatgcatttaatcacaaatccaaaacaatttgacgtcatcgtttgtgaaaacttatttggtgatattttaagtgatgaagcttcagtgattcctggttcacttggtttatcaccttctgctagttttagtaacgatggtccaagattgtatgagcctattcatggatcagcaccagatattgcaggtaaaaacgttgccaatccatttggaatgattctatctttagcgatgtgtttacgtgaaagcttaaatcaaccagatgctgcagatgaattagaacaacatatttttaacatgattgaacatgggcaaacgacagcagatttaggcggcaaactgaatactactgatattttcgaaattctatctcaaaaattgaataactaagggggagatgtaaatgggtcaaacattatttgacaaggtgtggaacagacatgtgttatacggaaaattgggcgaaccgcaactattatacattgatttacaccttatacatgaagttacttctcctcaagcatttgaaggacttaggcttcaaaacagaaaattaagacgcccagatttaacatttgcaacactcgatcacaatgttcctactattgatattttcaatattaaagatgaaattgcaaacaaacaaatcacaacattacaaaaaaacgccatagattttggggtgcatatttttgatatgggttctgatgaacaaggtattgttcacatggtaggacctgagacaggacttacacagcctggcaaaacaatcgtttgcggtgactctcacacagcaacacatggagcatttggtgctattgcatttggaattggaacaagtgaagttgaacatgttttcgcaactcaaacgctatggcaaacaaaacccaaaaacttaaaaatcgatattaatggtaccttaccaacaggcgtctatgctaaggacattattctgcatttaattaaaacgtatggtgttgactttggtacaggctatgctttggaatttactggcgaaacaattaaaaacctttcaatggacggtcgaatgactatttgtaacatggctatcgaaggtggtgccaaatacggcataatccaacctgatgatataacatttgaatatgttaaagggagaccatttgccgataacttcgctaaatcagttgataagtggcgtgagctatattctgatgacgacgcgatatttgatcgtgtaattgaacttgatgtttcaacattagaaccacaagtgacatggggaactaatcctgaaatgggtgttaatttcagtgaaccattccctgaaatcagtgatatcaacgatcaacgtgcgtatgattatatggggttagaaccaggacaaaaagctgaagatatcgatttagggtatgttttcctcggttcatgtacaaatgctagactatcagatttgattgaagctagtcatattgttaaaggaaataaagttcacccaaatattacagctattgtcgtaccaggttctcgtacagtaaaaaaagaagctgaaaaattaggtctagatactatttttaaaaatgcaggatttgaatggcgtgaaccaggatgttcaatgtgtttaggcatgaatcctgaccaagtacctgagggtgtacattgtgcatctacaagtaatcgaaacttcgaaggacgacaaggcaaaggtgctagaacacatttagtatcccctgctatggcagcagcagcagctattcatggtaaatttgtggacgtaagaaaggtggttgtttaaatggcagcaatcaaacctattacaacatataaaggtaaaatagtccctcttttcaacgacaatatcgatacagaccaaatcattcctaaggtacacttaaagcgtatttcaaaaagtggctttggtccatttgcttttgatgaatggcggtacttacctgatggttcagataatcctgatttcaatccaaataagcctcaatataaaggtgcatccatattaattactggagataattttggatgtggttcaagtcgtgaacatgcagcttgggcacttaaggactatggctttcatattattattgcaggaagtttcagtgacattttttatatgaattgtacaaaaaatgcaatgttaccaattgttttagaaaaaaatgcacgtgaacatcttgcgaaatatgttgaaattgaggtcgatttaccaaatcaaactgtgtcatcaccagacaagagtttccattttgaaattgatgaaacttggaagaataaacttgtaaatggcttagatgacattgcaatcaccctacaatatgaatcattaatagaaaaatatgaaaaatcactttaagggagttgaatattatgacagtcaaaacaacagtttctacgaaagatatcgatgaagcatttttaagacttaaagatattgtcaaagaaacacctttacaattagaccattacttatctcaaaagtatgattgtaaagtatatttaaaacgagaagatttacaatgggtacgttcttttaaattaagaggtgcttacaacgctatttctgttttatcagatgaagctaaaagtaaaggtattacatgtgcgagtgcaggtaatcatgctcaaggtgttgcctatacagctaaaaaacttaatttaaacgctgttatctttatgccagtcactacacctttacaaaaggtaaatcaagtaaagttctttggaaatagtaacgttgaagttgtactcactggtgatacatttgatcactgtttagctgaagctttaacttatacaagtgaacatcaaatgaactttatagatccattcaataatgttcatacaatttctggacaaggtacgcttgctaaagaaatgctagaacaagcaaagtctgacaatgttaactttgattatctatttgccgcaattggtggtggcggtttaatttcaggtattagtacctattttaaatcctattctcccaacacaaaaattatcggagttgaaccttcaggtgctagtagtatgtatgaatctgttgtcgtaaataatcaggttatcacattacctaatatcgataaatttgtcgatggagcttctgtagccagagttggcgatattacttttgaaattgccaaaaaaaatgtagataactacgtacaagtagatgaaggtgctgtatgttcaacaattttggatatgtattcaaaacaagcaatagtagcagaacccgctggcgctttaagtgtaagtgcgcttgaaaactataaagatcatattaaaggtaaaacagtggtttgtgtcattagtggtggtaataatgatattaatcgaatgaaagaaattgaagaacgttcattactatacgaagaaatgaagcattactttatcttaaatttccctcaacgtccaggtgcattgagagaatttgtaaatgacgtgttaggacctcaagacgatattactaaatttgaatacttaaaaaaatcttctcaaaatacaggtactgtcattattggtattcaacttaaagatcatgatgatttaatacaactcaaacaacgtgtaaatcatttcgatccttccaatatttatattaatgaaaataagatgttatattcattgttaatttaacacatattaagaaaagcagtcataaattgatttctaattgaaatcatcttatgactgctttttattatgctttacattattgaggttgcacgctttgtataccatcgtatatttctttgagccttaaatcttctttgtctttacttttttactatgtaactttagacataaaaaaagagaccttgcggtctcaacttgcctggcaacgttctactctagcggaacgtaagttggctaccatcgtcgctaagaacctttcttgacttgtgacaatcgcttgcttctttcctcttcttcggctctcgcttactcatttagctctactaaactcgttgcgctcttttctcgtttcgtcagattcaaacgttttcacttcgccaagccatttttctttgtgttaactttttactatgtaactttagacataaaaaaaaagaccttgcggtctcaatgcggctcatcgcatccattttttgcctggcaacgttctactctagcggaacgtaagttggctaccatcgtcgctaaagacctttcttgacttgtgacaatcgcttgcttctttcctctccttcggctctcgcttactcatttagctctactaaactcgttgcgctcttttctcgtttcgtcagattcaaacgttttcacttcgccaagccatttttctttgtgttaactttttactatgtaactttagacataaaaaaaagaccttgcggtctcaatgcggctcatcgcatccattttttgcctggcaacgttctactctagcggaacgtaagttggctaccatcgtcgctaaagacctttcttgacttgtgacaatcgcttgcttctttcctctccttcggctctcgcttactcatttagctctactaaactcgttgcgctcttttctcgtttcgtcagattcaaacgttttcacttcgccaagccatctttctttgtgtttgctttttactatgtaactttagacataaaaaaaaaagaccttgcggtctcaatgcggctcatcgcatccattttttgcctggcaacgttctactctagcggaacgtaagttcgactaccatcgacgctaaggagcttaacttctgtgttcggcatgggaacaggtgtgacctccttgctatagtcaccagacatatgaatgtagattatacattcaaaactagatagtaagtaaaagtgattttgcttcgcaaaacatttattttgattaagtcttcgatcgattagtattcgtcagctccacatgtcaccatgcttccacctcgaacctattaacctcatcatctttgagggatcttataaccgaagttgggaaatctcatcttgaggggggcttcatgcttagatgctttcagcacttatcccgtccacacatagctacccagctatgccgttggcacgacaactggtacaccagaggtatgtccatcccggtcctctcgtactaaggacagctcctctcaaatttcctacgcccacgacggatagggaccgaactgtctcacgacgttctgaacccagctcgcgtaccgctttaatgggcgaacagcccaacccttgggaccgactacagccccaggatgcgatgagccgacatcgaggtgccaaacctccccgtcgatgtgaactcttgggggagataagcctgttatccccggggtagcttttatccgttgagcgatggcccttccatgcggaaccaccggatcactaagtccgtctttcgaccctgctcgacttgtaggtctcgcagtcaagctcccttatgcctttacactctatgaatgatttccaaccattctgagggaacctttgagcgcctccgttaccttttaggaggcgaccgccccagtcaaactgcccgcctgacactgtctcccaccacgataagtggtgcgggttagaaagccaacacagctagggtagtatcccaccagcgcctccacgtaagctagcgctcacgtttcaaaggctcctacctatcctgtacaagctgtgccgaatttcaatatcaggctacagtaaagctccacggggtctttccgtcctgtcgcgggtaacctgcatcttcacaggtactatgatttcaccgagtctctcgttgagacagtgcccaaatcgttacgcctttcgtgcgggtcggaacttacccgacaaggaatttcgctaccttaggaccgttatagttacggccgccgtttactggggcttcgattcgtagcttcgcagaagctaaccactcctcttaaccttccagcaccgggcaggcgtcagcccctatacatcaccttacggtttagcagagacctgtgtttttgataaacagtcgcttgggcctattcactgcggctcttctgggcgttaaccctaaagagcaccccttctcccgaagttacggggtcattttgccgagttccttaacgagagttcgctcgctcaccttagaattctcatcttgactacctgtgtcggtttgcggtacgggcacctattttctatctagaggcttttctcggcagtgtgaaatcaacgactcgaagacacaatgtcttctccccatcacagctcagccttaacgagtaccggatttgcctaatactcagccttactgcttagacgtgcaatccaatcgcacgcttcgcctatcctactgcgtccccccatcgattaaaacgattataggtggtacaggaatatcaacctgttatccatcgcctacgcctgtcggcctcagcttaggacccgactaacccagagcggacgagccttcctctggaaaccttagtcaatcggtggacgggattctcacccgtctttcgctactcacaccggcattctcacttctaagcgctccacatgtccttacgatcatgcttcaacgcccttagaacgctctcctaccattgtccaaaggacaatccacagcttcggtaatatgtttagccccggtacattttcggcgcagtgtcactcgactagtgagctattacgcactctttaaatgatggctgcttctaagccaacatcctagttgtctgggcaacgccacatccttttccacttaacatatattttgggaccttagctggtggtctgggctgtttccctttcgaacacggaccttatcacccatgttctgactcccaagttaaattaattggcattcggagtttgtctgaattcggtaacccgagaggggcccctcgtccaaacagtgctctacctccaataatcatcacttgaggctagccctaaagctatttcggagagaaccagctatctccaggttcgattggaatttctccgctaccctcagttcatccgctcacttttcaacgtaagtcggttcggtcctccattcagtgttacctgaacttcaacctgaccaagggtagatcacctggtttcgggtctacgaccaaatactaaacgccctattcagactcgctttcgctacggctccacatttactgcttaaccttgcatcaaatcgtaactcgccggttcattctacaaaaggcacgccatcacccattaacgggctctgactacttgtaagcacacggtttcaggttctatttcactccccttccggggtgcttttcacctttccctcacggtactggttcactatcggtcactagagagtatttagccttaggagatggtcctcccagattccgacggaatttcacgtgctccgtcgtactcaggatccactcaagagagacaacattttcgactacaggattattaccttctttgattcatctttccagatgattcatctaatgtcgtcctttgtaactccgtatagagtgtcctacaaccccaacaagcaagcttgttggtttgggctcttcccgtttcgctcgccgctactaagggaatcgaattttctttctcttcctccgggtactaagatgtttcagttctccgggtgtgccttctgatatgctatgtattcacatatcgataacatgacataactcatgctgggtttccccattcggaaatctctggatcaaagcttacttacagctccccaaagcatatcgtcgttagtaacgtccttcatcggcttctagtgccaaggcatccaccgtgcgcccttaataacttaatctatgtttccaccatttttataagtcaaacgttaacatgaagttacgttcttttataaaaagatttaaacgcgttattaatcttgtgagtgttctttcgaacactagcgattatttcttatgaattcaagcttatttaaaactctttattcactcggttttgcttggtaaaatctatattttacttacttatctagttttcaatgtacaatttctttttagtcaatcgctcacatactgctttattttcaaaagcaatatcactttaaccaaaaaatatttgaatgttaaataaacattcaaaactgaatacaatatgtcacgttattccgcatcttctgaagaagatgttccgaatatatccttagaaaggaggtgatccagccgcaccttccgatacggctaccttgttacgacttcaccccaatcatttgtcccaccttcgacggctagctcctaaaaggttactccaccggcttcgggtgttacaaactctcgtggtgtgacgggcggtgtgtacaagacccgggaacgtattcaccgtagcatgctgatctacgattactagcgattccagcttcatgtagtcgagttgcagactacaatccgaactgagaacaactttatgggatttgcttgacctcgcggtttcgctgccctttgtattgtccattgtagcacgtgtgtagcccaaatcataaggggcatgatgatttgacgtcatccccaccttcctccggtttgtcaccggcagtcaacttagagtgcccaacttaatgatggcaactaagcttaagggttgcgctcgttgcgggacttaacccaacatctcacgacacgagctgacgacaaccatgcaccacctgtcactttgtcccccgaaggggaaggctctatctctagagttgtcaaaggatgtcaagatttggtaaggttcttcgcgttgcttcgaattaaaccacatgctccaccgcttgtgcgggtccccgtcaattcctttgagtttcaaccttgcggtcgtactccccaggcggagtgcttaatgcgttagctgcagcactaaggggcggaaaccccctaacacttagcactcatcgtttacggcgtggactaccagggtatctaatcctgtttgatccccacgctttcgcacatcagcgtcagttacagaccagaaagtcgccttcgccactggtgttcctccatatctctgcgcatttcaccgctacacatggaattccactttcctcttctgcactcaagttttccagtttccaatgaccctccacggttgagccgtgggctttcacatcagacttaaaaaaccgcctacgcgcgctttacgcccaataattccggataacgcttgccacctacgtattaccgcggctgctggcacgtagttagccgtggctttctgattaggtaccgtcaagatgtgcacagttacttacacatatgttcttccctaataacagagttttacgatccgaagaccttcatcactcacgcggcgttgctccgtcaggctttcgcccattgcggaagattccctactgctgcctcccgtaggagtctggaccgtgtctcagttccagtgtggccgatcaccctctcaggtcggctatgcatcgttgccttggtaagccgttaccttaccaactagctaatgcagcgcggatccatctataagtgacagcaagaccgtctttcacttttgaaccatgcggttcaaaatattatccggtattagctccggtttcccgaagttatcccagtcttataggtaggttatccacgtgttactcacccgtccgccgctaacatcagagaagcaagcttctcgtccgttcgctcgacttgcatgtattaggcacgccgccagcgttcatcctgagccaggatcaaactctccataaaaattatgatgtttgattagctcataaatactaaataatgtttgtaactatagttacgttttttggaattaacgttgacaaattgtcattcagttttcaatgttcattaaaattatctatggagcgggtgatgggaatcgaacccacaacatcagcttggaaggctgaggttttgccattaaactacacccgcttatttaattaagaattttgatgcggccgagaggacttgaacctccacgggatttctcccactaggccctcaacctagcgcgtctgccattccgccacgaccgcggatataggcatttaaaacatcttcgtttttcagaacgttatttattatattatgattaaaaatatttgtcaataacttttaatcgtttttttacattaaattaatttgtgttatcagttgttaacacaacgttatttataataaaacattaagaacttattgtcaacatattttataaattaaatttagaattgactgtctttcaaatcaaagtttatttaatttgttcttttttaaggaacgtgtttaatcatactaactataagctgtacagtcaatagataaattcaatcaaaatgtcattaaaaatgtataattatcttttgtgctactttaaagctttaattgggtaaagtttatatattattcattactaaaatacgccaagatttttaatctaatcaattgaatttcatcctatcaagtcacaatttatgccattacctatatcaatagtagaaaagccgcgattgcgaagtattaaattacgacaatctcggctttaaacattttataaacacaatttcttcttattcaattactatgtttaccaatcaaaataactcactgataaattctatataaattccatacaactcctaaataatcttacatatactcgaattagctctatttgtattgtacttatttcaattgtcttttcattcttaattttccattacaatgtccgcaacgcatacgattcgtatcaactttacggatacgtatatattttgcatgacatttagtgcaataatattcataattcgcccgttgttgatagctttcaatgctgttacaaaatctaggcgctccaacctgttggctcaatcgtttaaaatcttgatctttatgttgataacctttaccagcaatatgcaagtgataatgacataattcatgcagtataatttttacaatagcatcttctccataatgctcatattgttttggattaatttcaatatcatgggactttaaaagataacgtccgcctgttgtacgtaaccttttattaaaatatgcacaatgtcgaaacgtacgtccaaatttttcttccgaaaggttctcaaccattcgctgaagtttgtcattattcatgtggatcaatcatcgttaatgatactttgtctttatttttgtcaatactgtaaatccaaacgtcaacgatatcaccgacactgacaatatccattggattttttacgaacttcttagaaagtttcgaaacatggacaaggccatcttgtttaacacctatatctacaaatgctccaaaatctactacatttctaactgtgccactcaatttcattccttcttttaaatcttcaattgatagcacatcagatttaaggattggtgtttcaaactcgtcccttggatctcgattaggtgctttcaaggatttaataatatcctctaatgtaggtacacctacttgtaattcaatcgccagttcatccatatccaatgaatttaatttagcttttaatgcatcactacctaaatcattgccaccaaatccgagtttatctaataactgatacgttactttatagctttcgggatgaatcgatgtattatccaatggctctgacccgtctactattcttaaaaatcctatactctgctcaaaagttttagcacccaaacgcttaatcttacttaactctttattatgctttattgcgccattttcttctctatatgcaattatatttttagcaatttgcgaacttagaccagacacatattgtaataatgatgatgatgctgtattgacatcaacacctacttggttaactgctgtttcaacaacgaaagttaatgcattttctagtgctttttgattaacatcatgctggtattgtccaacaccaatagatttaggatcgattttaactaattcacttaatggatcttggacgcgtcgtccaattgatacggcacttctttcttccacttgaaaatcaggaaattcatctctagcaatttctgatgctgagtatactgaagcacccgcttcattgacaatgatgaattgtactggcaactgatgctttttaattaaatctgcaacaaattgttctgtttcacgacttgctgtaccattgccaattgcaattaattgcacatcatacgctttaaccatttgtacaaaatccttctctgctgcttcttttttagaaactggtggatgcggataaatcacaccttttgctataaaagtaccgaatgggttaatgactgctaatttacaacctgttctaaatgcaggatctacgcctaatatttgtttacctttcattggaggttgcagtaatagatttcttaagttttcactaaaaacatctattgcatgattttcagctttttcagttaaatcagcatggatttcacgctctatcgaagggacaattaagcgtttcaagctatctttaatcgcctctaaaatataactgcgatttacattattatgattgatttcttgacgtgcaatgaagtcctctactgatgtcgtatcgaattcaaactttacagataatactttctctttttcaccacgattcacagctaaaactctatgattagcaatgcgtttaattggctcactgtatgcataatacatttcaaaaatacctttttcatcttcagcatttttctttttagatgtagttaacacaccttgatgatacatatcttttaaaatttttgttctatatttaggattatctgaaatttgttccgcaataatatcttgcgcacctttgatagcatcttcaaccgattgcacttcttcatttataaattgttgtgctttttcttcaattgagacttcatgtttacgtgccttcatccatatcgctaatggttctaatcctttacgtttcgcctcagttgccctagtctttttcttttgtttaaaaggtctatataggtcttcaacacgttgtaatttgttctgttttaaaatatctttctttaattcctcagtaagtaatccttgctgttctatatttttgataacttcttctttacgtttttgtaaattgaccatatattggtattcgtcatcaatttgctttatttgaacttcatctagtccaccagtttgctcttttcgatacctcgcaataaatggtactgtatttttttcttcaagcagtgttaacactgcttcaatttgttttttactaaattgatatttctctatgattgaattaatcaattgattgtccatttacttaacccacactttttcttaaatttactcatttattttaacatattctaaagtacttctattaaggtatgatacttaatgcaattttaacttccaaaattttaaaaacgaattattaggtcatataatattttaaaacgcactaagattattgaaaatgacacaccatcatttcttaaatttcataatctaagcctacttttttattctaatagcaatccacctatttaagccgacaattagatatcttcctcacttaaattattaatactatatcgcgacatttatgtggatacacattaaactacgttaataatgcattaattcgaaaatcttaattaaattaaaaatacccctcgatttcatttgactaatcaagggataattgtatgaatttttcattataaaacgcatcattaataagcaaattctatttatgtgctgcttcttgtaatttcttaattgccgttctttgaagtcttgaaacatgcatttgactcaaaccaatacgctcgcccgtttctttttgactcaaaccttcaataaacgtacattgtatgatttctcgttcgcgatcagataatataggtaatattttttctaaaatcatacgtttttcagttaagtcataatggtcatcttgttgtcccataatatctaatagcgtaacagttgaaccatctttatcagcttcaatggaatgatcaacacttaacgcattataactttgtcccatttccattgcttctaacacttcttcttccgaaacttctaatcgatcagctatttcactgatagaaggtgaacgctctaattcagcggttagttcatcgcttacttttttgattcttggcccaatttctttaatacgtctcggaacatgtacactccaagttttatctcgtagatatcttttgatttcaccgattacagtaggtactaaaaaggcttcaaacttccgttcaaaggacatatcgaatctatttatggcacctattaaaccaaccataccaacttgaactaaatcttcgtgatgtgattgtcctttagaatatttatatgccaatgactcaattagtttttggtaatgtttaactaacttatcttgtgcatctgtattcttattttcttggtgttctttaatccattggttaatttgctcaggtgaaacttcattagctgatttcgactctttcgccattatttcgcacctgctctttttttatatacttagtcatactgattgtcacaccagattctttatatactgtcacttcatccattaaagattcgattaaaaataaacctaggccaccttcgcgtaaaaagtctatattttcgtctttatcataaggacctatttttgatttagttgtttcataatcaaaactgtcacctttatcagaaataacaattttaattttatcttctaaaatttcaaaatatatgttaataatgcccacattgtttttttctttgtatgcatgtttaactgcatttgtcacagcttcactaactgcaatcttggcatcttcaatatcatcatatgtagcaccagctctcgaaaaaacgccagaaagtgttaaacgaattaaacttacatactctgccgatgctggcacgcgcatttcgataaaatcttctttagattgcatgttattcgacctccgttccttcattaacatgcattaaatccttaagaccagtaatttcaaatagtctaccgatacgatctgacacacctaaaatgtatagttctttatcattttggtttaatgcttttaatgtacctacgaataaacctaaacctgtcgaatccatataactcacattttctaaattaacataaatatcacgagttccatcttgtctcataggtgttaaaacctcttctaattcaggcacagtataaacatctaattctccaccgactttaacttcgtaaaatttatcttgagtggttgtttctatattaagattcatttcattacactcctacttattaaaaatatttatcttcattttaagcgctgtatccaccatatttatatttcaaattattatatacccatcgaaataatttctaatcttcttttttaaattaatttactctttttataatcaaaatagtcatatcatcttttttatttgggttttgaagctttaaaattgcttcatagataatttgaacaatatcttgtgggtgcatatgtttatgttttttaatatattctaaaagtttttgtttatctataaaggtaccttcactatttctagcttcagtcacaccatccgttaaaatgataattaaatcatcaaggtatattggaatttcttgttgttgatatcgtgtttgtgaactgattcctaacactctacctctaactgaaatttcttcaaattcttctttttcagcgcgataaatatatccaggctcatgaccagctgaactacaatacaataaatggttcatttcttcatataaaccataaaacattgtgacgaacatattttgattaatattcttttcaacaacacgatttaaacgttttaagccatcactcggtaattgtgagtgtccataagaatccatgccaaactttatcatactcattgctaaagcagctggtataccttttccaatgacatctgcaacagcaaagctcattgtgccatcgttatggtcaattaaattaaaataatctccacttactttttgtgccgccactgaaataacgccaatttgaatactatcaaattgtggaatatctgttttaagcattgtttgttgtaagctagaagctaagtctatctctttatcgtgaacttgaagtttatctaccaatctttgataatctcgataactataaccaaagcctttaacgatttcttgtaagacatctaatgtcttgaacacatcttcacgcgttaagtttaacgtcaatatatagtttttgtgaatatcgacaatgtcttcaggcaagacgtccttacgaatcacttcgtcagtgtatttctcacacttttttatcaattctactttatcttggcacgttaaactttcatcaattaaacccttataatgttgcttaaattcttccacgattagttgcctcctcacttcccttacaaagcaaatgcttaagcaaggataattatgattcacttactaacatttatttaattgcacttatcaattttgtcgtttgcaattttgctgtagatgatacttttaagctaaaaaaaactttaggatggaatacctaaagcctaaaaaacttaagacatccttttataataaaaaatatgaatatcataactggtatttgctaaaatctttgtttataagaaaattcttcgtacagaatttagaaatagttataattattataaagttattgtcttttatatcaatattttatttatctctgaaaaatacatataatagacgcctaatttttctgatgagctactgcattcagccctaaactaatcattagtgcattatctacttctttcattttatcatcggataagtacgtcagtttttctttcaatcgttttttatcaagtgtacgaatttgttctaataatataactgagtctttatccaatttatactttttcttttcaatctctacatgtgtcggtattttcgctttattaatcctaccagttattgccgcaacaataactgtaggactatatttattaccagtatcattttgaattatgactacaggtctgactcccccttgttcagatccctgtactggtgataaatctgctaaataaacatctcctcgtctaatcattcattcgttgaattagaagataaatatgtttcgttgcaatcgcatgcttcacactctatcggaaaagcttcgttcgctagggagagatttaaatcagccatttgtgaatatccttcttttaaagattgttctaagctatgacttctattttgactaaaagataacatatgagaacctccaattgattccaaaagttattaaatgacctttaattactctaatgataacaaattttatatgcactgaccatattattttaacaattcatttgttacaaaacgttgatcaccatcatgatagattcgtggcaaacgtctcgacaagttacaaagcacttcataattaatagtatgttgcttttcagctgccacttctaccgactgtggactttctctatgattatctattaaaatcaccgaatctccagctttaacttgatctggcacttttacaattgtctgatccatacatacgcgaccaataacttcgcattgatgaccatttacatttacaaagctaccttgcataatgcgtaaatagccatctgcatatccaataggtaacaatgctattgttgttggatcagtagctgtataagttgcaccataacttacagactcacccgcttgtagcgtctttgtttgaactacattagcaattaattgcacacttggtttaaggtgtactttaactttttgctgtacatactctgatggataatatccataaagggaaattcctggtcttattgcattacagaattggcaatccattaatagagaacctgctgagttctgacaatgtatatattcaggtttaattgcttcattgaccatatctttaaaacgttgatattgttcagttgtcatatatcctggttcgtcagcgcaggcaaagtgtgtaaacacgccttcaaatacaagttgctcatattgttgaatgatttcaatcacttcttgatacgttttagtgtctttaatacctaaacgtcccattcctgtatctaatttaatatgcaaccacaactttttctcttgctcaccagaaatgtttttaattgcttctttcaaccactgtttagacgggaccgttaaggcaacacggtgttgtatcgctttatcaatatctttagctggtaacacacctaagactaaaattttagcagtaatcccatgcattctaagttctatcgcttcatctaacgttgctacagcaaaaaatgtggcaccattttccattaaatgacgtgctactttaacactacctagtccataggcattggctttaacgacagccatcactgttttatttggatgcaatgtactgaatactttgaaatttgatgcaacagcgtttaaatctacattcatatacgcagatctataatatttatctgacatattacttcctcctgtaattcccacacgttttaaaactagatcttaattatcattgtataacaaatttaaaatgctgacttttctaaaacaacttggctcatcgcatattgctcagtgtgtgagatactaacatgtacgatgaacccttcgtaatcaatctttggtttgccaagttcgtcgttgtaacagtctatatcgttaaaagctacatgttttcctaagcctgtgcctaatgctttactgaacgcttcttttgtagcaaacctgccagctaaaaattcaattttacgttgctcatgtgtgaaattgttgaatttgtgctgttcatttttagttaaaatccgctcaaccaattttggttgcttactatataacacttttattcgatcgatttcgattaaatccacaccaattccatgtatcattgattattcctcatttttattgttttctaaatgtctctcgttatttaaccatcgtttcaatctacgtgcttcacttctatctattaattcaatttcagcttgaccacccgctgtataaagtgtcaaagttgctaatcgatagcgtctcattataggtccaacatcgatatcaatattttgaatacgaaaatatggtattactttttcatccaaaaataaaatgccgtttcgtacacgcaaatggtgtttttcaaatgcatatctgcagtgcttatatcgatagactggcactattacaagcgtgaaaacagcaacaagtaatattataatcacactactaacaatggatatatagttatctaatatctcccaaaatagccagttcaaaatattaaatgctattaaaagtacaagcgctatgggtatccaaaacagcacagcgcttaacctcatcacttttttagcatgtggtgacataaaattataatcactcatcattttcacctctcaaataccatgatttcaatttatttgcatcttcacttcttgcgtattttaagttaatcgattgggctcccacacctttagcaacaataaaactaaaattatttaaattgttgcgtttaagtaatgtatgttgccaagtgtcaaatcctataatgtgatgcgctttaaaataataaatatttcgtttcaatagctcgaaattctggatagtaatttgttcttctgtcattttaaaacccgcatgtttgacataaagatatcctttgatcacaaataaaccaataatgactaccgttataatcgtaaataacaataataattgattccaaaaataacagccaattcctgccatagctatgacaataatactaggtattaaaaagtgtctgtggaaacctgacaaaggcataccttcattaacttgttgataagataaatcaggtactaaattctggataatttgataggctttgtctcgtttaataaacggcaatatcgacacactacctgaatcattgtcatcatcttcaatttttttattttcaaaatcacttgtgatgataaaatgtattgctgtgtagccaaataatcttcgtatatatgactgatgttcaacaacagcttgcaatcgtttcgttggtacagtcactttcttcttgttaaatagaccatattcaattttaagttgctcattttcaagcatcaccgaaaagccataaaatcttatcatcgttataatcgttccaataatatatgccagtattaatactagtaaaatgatgattaatactgaaacacttacaatttgaacccattgactaatttcatgatttagcttcgaccatgggatcaactctcttacagcgccgtaaatcggtactaaagctgctaacgttaccccaatggcgccactggtcattgccataaataacgattctttaaaattcatttgatatataggaatacgtttatttttctgattaagcttactatcagagttctgcacttcatctagccgaccttctgcgatgtcttccacattaccttcaatgtcatgattacggttgccattctgctcagtactagacttttgcgccatttctgtcttcaactctgtttgcaattgatcaatatagcgttcaagatattcaccttgttttttcgaaataacacttaacacaataccatcacttggtgttttgatttgtaaatccacaccaccaatgatttgattgacgaccccttgtgtcatatcaacggactgaatacgttttatatttaattctttacgctttttattaaaaatacctgttgttaaaatgaaataattatcctcaatccaatatcgcgtgttcataattccgacaatttgagaaatgtatgatattaaaaagaatacaaatacaatacctatccataaatatgattcgggattcgtataatcaaaatctttcaattgaaagataacaaaaataaaaaagacgactatgttttgtttgatagcattaattatgccattaaaatatgaaatcggatgtaatttttgaggttcagacatcactttcaacccctctcaaattcgacatagttctcgcttcgattattttaacatcgtcatgagacatcatcggtaaataaatagtatgacctgcagtcataaatccaactttatacaaattaagcactttactaattggattagatttaatcgacaagtattgtaaacgttcaattcgactcgtttcttctttatatattaaaaatgatgtacgatattgtacacttagttgatcaatttgataaaagcgacagtgatattgccataaagacttaataaataattttaatgtactcagagcacctaaaaccaacaaaatataaattaagtactgaggccattcaaatcttaaccatataaaataaaaaatgacatacacagctacactcaatataaattctaagccattcgtaatgtagtaatacaacaatgctgacttaggactcttagacaacttagtataatctgacatatacccctctccccaaataaaaaattatacggatttataatctatttcattttatttttatatgttgataattatagcatatggaatatttcatgctaatttattcttcctaaaggttcatctaaaagtttagttaagcagaaagtgcttgaattgctaaaaagacaccatgttataattttatcaacatgatgcctttcatctatattcaatctttcatcttatcaagagcaatatttagttcaagcacattcacataatcatttgttagcacaccacgctgcttacgatgttgaatcaagtcggtcactcttgaagtagatatatgacgagcatcagcaatacgaggtgcttgcttcaatgcattttcaagcgtaatatgcggatctaagcccgacccagaacttgttgcagcatctattgttacatttgaattaccaaatttaacatgatgtttcacgcgtgctattaattcggtgtttccattcgattcattacttccacctgatgatacgccgtttttatataatttttcaggattcatattataatcaactgcactcggtctcccgtgaaaatatcgtgtctctgtccagtgctgtccaatcaattttgatccaactatacgattgtcatacgtaattaaactaccatttgcttgttgataaaaaaatatttgaccaattaacgtgatagctaacgggaataaaaatccacataataccatagttattatcgttaaacaaatactatttcttatcgtattcatggtacagactccttcctctttacacaaaaaattgtacaatcatatctattaatttaatgcctaaaaacgggacgattaatccacctaatccataaatcaacatattatttataaaaattctatcaatgctgtaaccctttacttttacacctttcatggcaattggaattaaggcaacaatgattaatgcattgaatatcaaagctgatatgattgcagatttaggtgacgataaatgcataatatttagtgaagtcatttctggaatcgttgacatcattagtgcaggtaaaattgcaaagtattttgctacgtcattagccaaactaaatgtcgttaatgcacctctcgtcattaataattgtttgcctatttttacaacctctattaactttgtaggattcgaatctaaatcaattagattggccgcctctttagcactaattgtccctgagttcatagctaatcctatattcgcttgtgctagcgcaggtgcatcatttgtaccatctcctgtcatcgcaacaatatggcctttcgcttgttcatctttgatgactttaattttatcttcgggtttacactctgcaacaaatctatcaacacccgcttcttttgcaattgtagctgctgttaaagcattatcgcccgtacacataactgtttcaatgcccatttttctcaattcagcaaatcgttctactagaccatctttaatcacatcttttaaataaatcacgccaagcatgacgttgttttcaataactattaatggtgtgccacctttactcgatacatccatacagatagactcaatattaagaggaatatcgccttgttgttgtttgacaagatttatcatactattaggtgcacctttgaataccgatatttcatttgtaatgattccgctcattctagtttcagctgtaaaaggcttatatgtgccatcaatgtctttaggcagctcatttatatacatctgcttcgctaatcgcacaatactttttccttctggcgtatcatcgtagattgatgacatataagcagcgactatcaatttttcccacatttgttgattcactggtaaaaattcactagcgattcgattgccataagtgattgtgcctgtcttgtctaaaatcattacatcgacatctccacatacttctacagcacgcccacttttcgctaatacattgaattgagtaacacgatccatgccagcaataccaattgccgataacaaaccaccgattgtcgttggtattaaacatactgttaacgcaatgagcatcgcaataggtaaaattaaatgcaggtaagatgctattggatataatgttacaataacgactaaaaatataattgttaacgttgttaataatgtaaaaagtgcaatttcatttggtgttttatttctttccgccccttcaactaaggcaatcattttatctaaaaaagatgtacccgcttcactctcaacacgtatttctaaccaatcagatgttacaagtgtaccgccaatgactccatcaaaatcgccacctgattcttttatcacaggtgcagattcaccagtaattgcagattcatcaacggttgctaatccatttattacaacgccatcagcagggattgtttctccattttctacccgaatattttgtccggcttttaactctgtggcgttcactatccgatacgcaccattttcttctatcaatcgagcagttaaatttgattgtgcttgtcttaaactatcagcttgcgcttttccacgaccttcagcaaaggcttctgaaaaattagcaaacaatatagttattaataatatgataaaaattgtaatcaaataacctcgcgatagatagctagttccaaatatgtcaggaaaacatattaatatcaacgttaaaatcattccaacctcaacgacaaacattatcggattttttattaattgtttaggattcagcttataaaaactcattttcaaagcttctatcaccattgtttgattgaaatatttatttacatgatgcattttttccatccctttactttattttaaagttaaaaattcaccaataggaccaagtaatagtactggaataaatgtcaaaccacttagtaaaacgataaatacgattagtgatacgccaaaataaggtttatcaatcgctattgtatatttatcttggtggtatgattttttattcactaaacttgatgcaatcattaattgcaaaataattggtatataacgagaaagcaacataatgattcctgtagagatattccagaatgttgtatcatctttcagtccttcaaaccctgatccattgttcgctgcagctgacgtcatttcatacataacttgtgagataccatgaaaagacggattcgttatactttcacttgctccaggaatcataaaagcaagtgctgaaaatactaaaattaaaattggatgtatgagaaagactaagacaatacatttcatttcacgggcgccaattggcatatttaaatattctggtgttttaccaaccatcaaactgcatataaacaccgtcagtaagacatatatcaataaattcatgagtcctacgccttcgccaccaaatacaacatttagcatcattaataccattgggcctaatccacctaaaggcgttaagctatcatgcatgttattaacagaacccgttgtaaatgccgtcgtaataactgtaaatagtgctgacaagcctgctccaaaccgtacctctttaccttccatattcggtccataaatgcctaaatttgctagtattggattaccacgatactcactccacatagttaatgtaagaattgctataaaaatgaaaaacattgcgacaaataatattagcgcatgacgatgcactcgtttaccatgtctacttaacattcgaccaaataagaacaacattgacataggaagtaacatcatactgcccatttctataaaattactccaaatatttggattttcaaaaggtgttgcagaatttcctgctaaaaatcctccaccattcgtaccaagatgttttatagattcaagtgatgcaataggtccaaatgcaatatgttgaatatgtccacttaaagtccgaatcattaaattagcatgcaacgtttgtggtacaccttgagtcatcaataaaatactaattaaacatgataatggtaaaagcactcggacaataaaccgaacaatatcttgataaaaattaccaatgatattagtcaatctagttaaacgtctcaacatcgctatacaaacggcgtaacctgatgcactagatgtaaacattaaatatgtcattacaatcatttgcgttaaatatgtcacacctgattcaccgttatagtgttgtaaattactatttgttaaaaaagatattgctgtattaaacgctaaatctatcgattggtttaaattatgatttggatttaaaaaaaaccattgctgaactattagcaatacaaatgttataaaccccataaatccattaaatgccagaaaatgtttgacatatgttttagctgacatgtgttctaaatctgtgccgataattttaaaacacacattttcaaatctagtaaatattaaatctactcttgacgactgcaccaatgctacgcgatatagatatccactaaaaacatacgcaatcataaccatcattgttagaaacaaaattatttccatgataaccctcacttaataaatttctaaaatttttcactacgaattaaggcataaaataaatacaaaactaatgcaattactaccaataataaaacgatgagcattgtcataacctccttacaacacaacaacatcgtaacaacttgtttatgagagaaacattaattttcaaacttagttattaagaaatcattaagatgtgtatgcagaaataaattttatagcatttaattgtgaagaatattatgatattgctatcgaggtgaaggttatgtcaaacactgaatcgctaaacataggaaaaaagcgtggatctttaacaatttacatcggttacagtccgggtgttggtaaaacatttgagatgctttcaaatgccattgaactatttcaaagtaacgttgatattaaaataggatatattgaaccgcatcaacgtgatgaaacaaatgcattagctgaacaattacctaaaatcgcaaccaattttactaaacatggtagtcatcattttcaatatttagatgtcgaccgcataatcgaagaatcgccgacaatagtacttatcgatgagttagcacatacgaacatttctagagatcgtcatgaaaaacgatatatggatattgaagaaattttaaatcatggtatcgatgttcatactactttgaacattcaacatattgaaagtttaagtagtcaaattgaactgatgaccggtgtacatgttaaagaacgtgtacccgactatttcataatgagcgccgatgtattagaagtcgtagatatctcacctgaacaattaattaaacgcttaaaagctggcaaggtatataaaaaggataggctagatgtagcttttagtaatttctttacgtatgcccacctaagcgaactgcgtacattaacgttaagaacagttgccgacttgatgagtgataaagaaaaagtccgacacaaccataaaacgtcactcaaacctcatattgctgtggcaattagtgggagtatttataatgaagcagtaattaaagaggcattccacattgctcaaaaagaacatgcaaaattcactgctatttatatagatgtattcgaaaaaaacaggcaatataaagatagtcaaaagcaagtgcatcaacatctcatgcttgcaaaatcattaggagcaaaagtaaaagtagtttatagccaaaccgttgcattaggattagacgaatggtgtaaaaatcaagatgtaaccaaattaattatcggacaacatattagaaataagtggcgagactttttcaataaacctttaattgaccatttaatgtcctttgaacatagctataaaatcgaaatcgttccaatcaaacaaatacctgttgaattgaaaatgaacaagtcaccctatcgtcctaaaggcaaacgtttcgccatagatatgttaaaaatgattttgattcaaataatttgtgtaatgatgggactgtggatttatcaacttgataagcatgagtctagtacgattattttaatgatttttctcatcggcatcattttgttatccatttggacgcggtcctacatcattggctttttagcagcaattattaacgtatttgtttttaattatttttttacggaacctagatatacatttgaagtataccgctttgactatcctattacatttatcgttagcattttaacaagtattttaacgagtgctttattaaaacaaattaaattccaatactccattactaaaaagcaactttatcgtacagatttattatttcaatttaatgattcgattaaacaaacttatacagttgaaaacttactaataaatgctggataccaaattaatcaattattgcaacaatcaattactatatacgttatcaatcaatccaaagtaattaaaacaataccattgcaaaaccatatcgataatacgactcaacagcatgaacaagcattaagctgggtaattaaaaatgaaagacaagctggtgcaacaacagatacatttccaggcattaataaatggttgataccaattggcacatctccgattaaaggcattctagccattgattaccaaagttctcaagtgattaatccatatgatgcatcaatattagaatcaatgttaaatgaactttctctcgccgttgaaaatgtgacgttacttaaacaaacgagagaatccatgttacaggctgaacgtcaactgacacattcaaattttttaagatcaatttcgcatgacatacgtacaccgttaacaacaattatggggaatttagatattttagtatcacatagtaaagatatgtctatcatagaaaaggaacaattacttgtgcatagttttcaagaaagtcagtatttatatctattagtaacaaatattttatcattaacaaaattacagtcatcaaatgttcagataaaagtgcaaccttatctcgttagtgaattagtagaagaaatcgatatgattttagaacgtcgccatttaaaaaagcgtataactgtatcatcctcagtagatttacagtttatacacattgacagtaagttgattttacaagctttattcaatttgattgaaaatgcagttaaacacacttctactgacaccaaaatcaatttatctattcgttatgctagcgatgaacaaatcgaatttgccgttatagacgaaggatctggaattagtttagaagaacaacaaaagatattcgagcctttttacacaggatcaaataaatattttaaagataaccaaaaagaaagcatgggactaggcttatatttagtacagactatcctacacaaacatcaatcaaacttacaatataaaccaaaccaaccacacggcagtatattctatttcaatatagatacagactttaatgaaggagacatataatgcaatctaaaatattgataattgaagatgatcacgcaatcacacatttacttgatgttgcattaactttagattattacaatgtaactacagccgaaaatgccacacaagcacactttaaaattcaaatcgataaaccagatgtcattttattagatttaggtttaccagataaagatggattatgtctgatttcagaaatcaggcaacatactgacattcctatcattgtaataagtgcaagacaagaagaacaaacaattattcaagctttagataacggtgcgaatgactatatgactaagccttttaatgttgatgagcttcgggcacgaattcgagtcatcgaaagaatcgctaagtcacatcaagaaactaacattgtatttactaacggtttgctaagcatcgactttggctccaaatctgttgttattaataatcatgaggtacatttgacaccaaatgaatttagcttgttagaactattggcaaatcataaaggaaaagtactcacttatgagatgatattaaaacgaatatatggctatgttaataagactgaaatgcctagtttaagagtgcatatgacatcattaagacaaaaactttcacaatgtcacgaggacgcaaaagatattattaaaacacatccacgcattggttatcaaatgttgcagtggaaagagaaataattaaataaaaaagatcgctgccattaaacgaatgattggcagtgatcttttttatattcaacttattatttatcgcgcactagtgtcagcaaaatgccctattgttttttacaagaacatgataccgaaattacttttataaagtttatttatgttcgattattcttaatttaagtagtcgttatattctagattcatatttatatttacacagaatgatataaccgcacacagatctcaatccaattaaatatttaacctttaaaacgttagtactttgatatctacagagaatcagttattgaaaacaaaaaagagctcaagacattacatctttaagctcttgatctataaattatttttgatggtcagcaaatgtgcgacctttcataggtctgcttccaccgctgctcttctctttacggtcaaatttttttgtacttttcttcttacttgagtatccttttgaacgtttactcttactgtcaaatttaggattaccacgcttactatttctgttacgagaaccacttggtttaccgttacggcctttgcgagataatggtttttcaaaagttaattgaacttcaacttcatcgttcgcttctactaactcttgtaaaagtgcagcaactaaatcaacatcgttatattcatttaacaactctgtagaaatgcgtttcaagcgtgattctgactctttagacatccagttttcaactttttctttgatgtcatcttcacgtgcttgaagtacttctttacgatgtggtggacgaagtgcgctcatttttctaccattagcatcttcaatttgtctaatgtaatccatttcaattggatttacaaatgttaccgcgataccttctttaccagcacgacccgtacgaccaatacggtgtgtatagctttcagtatcttgaggtatatcaaagttataaacatgactcacaccagaaatatctagtcctcttgctgctacatcagtagcgactaaaatattaatttggtcatttttaaatttctttaatacttctaaacgtttcgcttgtgtaatatcaccatgtaagccttcagctttatatcctttagaaatcaaagcacttgttaattcatcaacacgacgttttgtacgtccgaatacgattgctaattcaggttgatgaacatctaggaaatttgtaaatgtatcaaatttctctaattctttaacaattgtatagaattcttcgatttgtggatcagacatttcattattcattgtcttaatgatttttggtgatttcataaattgttgtactaaagcttggattgctttaggcattgtagctgagaacaacattgtttgacgttgtactgctggaattttatccataataaatctcatatcatcgatgaatcccatattcatcatttcatcagcttcatctaaaatcaaagtatgaattccgtccgtttttaatgtgcgacgatttaaatggtcgataacacgcccaggtgttccgactacgatttgtgggccttttttcaaggctttaatttggcgttcgataggcataccaccgaatacagtaacaacttggacaccttgtccacggctaaattctcttaattgttcagctacctgcattgccaattctcttgtaggtgctaaaatcaacgattgaaccccttgtttccctactactttctcaattaaaggaataccgaatgctcctgttttacctgtaccggtttgagcttgcccaaggatatcaattccttgtaacgcataagggatactgtctttttggataggtgtcggctctttaaatcccattgattcaagtgactgaaccgtattatccgaaatccctagttctttaaaattttgcaaaataattctcctttttacctgtttatttctcaatatacttttgcatataagttcattaatatttcatcaacttctatatagtaccaccaaaaaaatttaatcgcaataaagcaatttgcgaatatttattagaatcacattaattgattgtcatatttttgtcaaaaagctagcattagataagatgtaagcgttacgcatcattcgaataatcattataaaaaattttttataaaatacgtatatcgttaacattccacaacaaattttactgaaacacatgtgaaattagacattataatactacatctttttgtaaaatattatataaacattcaaactacttcctatataaagtgtgtacatagaattaaccttgatttagtttcaaatttttagatttaacataaaaagaaaaaggtaattttgtatttacacacaaaaccacctcttctttgtaatcttttagtattaattcaaatcatttttataagtaaaaggtcgctcgactaatctctatgaaattaaagcatttacgacttcttctaacttcataccacgtgatcctttaactaatacacgatcatgcgcttttaaatcatttgttaaaacttctatcatatcgtctttagaattgaagtgttgtgctttttcgacatgttgctggcccgaatcataaatatactttgcttcattaccaaacgtatacaacacatctatatgcttttcttctaaataattacctacaccgatatgcatttctttgctattttcacctaattctaaaacatctcctaaaattagaatgcgacgccctgtcaaagtactcagtgtatcaatagctgctctcatacttgtaggacttgcattataggcatcatttatcacagtaatatcattttctaatgtgtgttgctccatacgcataccagttaagctgacattttttaaattttgatagattgtgttatatgtcaaacctaattcatgaccaaccgcaatggcaatcgtcgcatttttcatattatgctttcctaatattggcagatcataatgttctttattattaatcgtaaatgaaatacctgtagtatctctatcatcaacagaacaaactaatgcattatcagtagcaacaccaatactaatacattttgcattttcaacttctttaacatgcggtttcaataatggttcatcgccatcatatataaacgtaccattatcttttagacctattgtaatttcagatttagctttagcaatcccctcgcgcgaacctaaatcttgcatatgtgactcaccaatattagttataactgcaatatctggttgagcgaggtttgacagaaattcaatttcatggaaacctgacatccccatctccaatattgatatttcagtatcattatctaattccaaaatagttaaaggtaaaccaatttcattattgtaattaccttgcgttttcttaactttaaattcggtatgcaatacactttcaatcatatctttagtcgttgttttaccattagatcctgtgacggcaattactttagggtttacatgtctcaagtaagcttgtgccaattgttgtaatgccgttaatgtgtcttcaacccatataataggcccgcttacattttcatctataggtgtccctctttgataaaaagcagctccagcaccatcttgtaatgctttagagacaaagcgatgaccgtcaacattttcacctttaaatggtataaataacatatttttagaaattgctcgtgaatcaattgtgactccatttatctcttgatttataaattgatcttcaatttcacaaggaatccatgattgaatttgctttaatgtaacattaatcataataacaacctcagttagtcaattttgtatttatttttctgtttatcctggtgacgttctttagcaagctcgataagttttgtaatcaattctggataagataagcccatattttcccataactttggatacatactgaaagccgtaaatccaggcattgcatttgtttcattaatatatatttggttgtcttctgttacaaagaaatcagcacggactaaaccagaacaatctgtcgctttgaatgcctctaatgccatatttctaagcgttaattgaacatcttcgtctaagtcagctggaatttgtaattgaaccttaccatctttatattttgatttgtaatcgtaaaacgcgacatcttttacgacttcacctggccatgtcgcttcaggatagtcatttcctaaaactgctacttcaatttcacgtgcgttaacgccttgttcaataacaagcttacggtcaaattggaatgcttctttaataccttctttaagttccgcttcattattacatttactgatacctacacttgaccctaagttagcaggtttaacaaagactgggtaatttaatttatcatttactaattttaaaatgttatgttcatatttttcatattcagaacgtaagaaactaatataaggtaactgtggtaatcctcgatgttcaaataattgtttcattacaagtttgtccatagaacttgcagctgacaatacaccatttcctacatatggtacatccaaaacttcaaaaagcccttgaatcgtgccatcttcaccattaggaccatgtaataatgggaatactgcatcgtatggttgtcctgaactactttctttcaatagctgtgaaatctcaagcgcctctccattttctaaatgaagctcatcagtagatttaatttcagctgtaatattattttgctttctccaatcaccatcattggtaatataaatgatatcaacatgatatttgtctttatctattgcatttaatacattttgtgctgtcagaatcgatacttcgtgttctgcacttttccctccaaaaacgatacaaatattttcttttgtcatttcgttttcctccaatgatatatcagggtttgctaccttaatataaattaatattgatttagtccaattgttaattgatttattcgcatctttgaatcttaatagtatcacattttaatgctattttgcattttaaaaacgaggcgttatgtgtctgtatctatgttgattcatttataatcagaacaatattcccttctattttattcctaattcaaattgaaatctatagctgatatcactgtgatattctagctaatttttaaaaagtcatgtaaaattgatataaacattagtgagtataaaaggagtttgcaatgaattattcatctcgtcaacagccggataagcattggcttcgcaaagtagactgggtattagtagccactatagctgttttagcaattttcagtgttctgcttattaactcggcaatgggcggtggtcaatacagtgctaatttcggtatcagacaaattttttattacattttaggtgcgatttttgcaggtatcatcatgtttatttcacctaaaaagattaaacattatacatatttattgtatttcttaatctgtctattattaataggcttgctcgttattcctgagtcacctattacacctattatcaatggtgccaaaagttggtacacgtttggcccaatcagtattcagccatctgaattcatgaaaattattttaattttagcattagcgcgtgtcgtttctagacataatcaattcacatttaataaatcattccaaagtgatttgttattatttttcaaaattattggtgtctcgttagtaccaagtattttaatattactgcaaaatgacctaggaactacattagtattagctgcaattattgcaggtgtgatgttagtaagtggtataacatggcgtatcttagcacctatctttattacaggtattgttggtgcaatgacagtcattttaggtattctatatgcacccgcattaattgaaaatttattaggtgtccaactgtatcaaatgggacgaatcaattcatggcttgacccctatacatatagtagtggtgatggctatcatttaactgaatcacttaaagctatcggttctggacagttactaggtaaaggatataatcacggtgaggtttatatacctgaaaatcatactgactttatcttttcagtgattggagaggaacttggttttatcggttctgtcatattgatcttaatatttttatttttaatcttccatctaataagattagctgcgaaaattgaagatcaatttaacaaaatctttatcgttggtttcgtcactttacttgtgttccatattttacaaaatattggtatgacaattcagttgttaccaatcactggtattccattaccatttattagttatggtggtagtgcgctatggagtatgatgactggaataggtatagtcttatcaatttattatcatgaaccaaaacgatatgtagatttatatcatccgaaaagtaattaatttaaactattttgagtttctaatatcataacttttcaagatgacgttatatagtctatttatgtcgtcgatttaaaatgtcatatatagatattactcgataataacaatcatccctctttgaagttcacattgtaaaatgtacactctaaagagggattttgttatatagtacttgctttcattttagtaaatacagtcaaaaaagctatcatcgaatagtccgacgatagctttaacggtgtgtgattcacaatcacagtcaattattttaattcgtgacttactttattagatgctggcaaagtattaataatgtctaaacgagatttagtttttttaatattcacacctaatgatgacaatagtttgactacattttgaatcttttcaggacgtttcattattatcacctcgtttggatcgctttcaatattatcttaccctattcgacatacctttactacatcatttacaaattttttaatttattttcaaaattaaaatctatagcgcactctacattataccctaaaatacaattttgtatccttcatcatagatttctttttcaatactattcaaatttgctggtgtctcatacgatacagttacttgaccgtctattatattaatattcacttgatgaacacctatcatatttgaaatgcgttctgtcaattgacttacttgttcttctgtttcaattcccgatgtgtaaatcgtattttgatgtatcatcttaaactcctttagtctttaatcaatttttgaaaagtcactaataactcttccattgcctcttcctgagcaccttgattaactttattcataatacaacttttcatatgttgttctaataactttatcgcaacactgtttaatgccgaacgtgtcgctcttatttgcgtaaggacatcatcacaatagacatcttcttcaatcatgcgattaatcgctctcacttgtccttcaattcgatttaaacgtgatttaagattcgtttttatttgttcagaatgatgtgcattatcttgttcagtcatagcattcactccttcatttacattccttactatactatatcccataaaacacaacgtcaacacaaagtgtgtttttcaaactaaattgtcatgatatttaaattgcttcatgatacaattaataagatatactactcgtttaagattttcgatgggaggtttcaaatgatagagttattatccattgcactcaagcattctaatattattttaaattcaatatttattggtgcatttattttaaacttattattcgcctttaccattattttcatggaaagacgttctgccaattctatctgggcttggttactagtcttagttttcttgcctttattcggcttcattttatacttactattaggacgacaaattcaacgtgaccaaattttcaaaattgataaggaagataaaaaaggattagagttaatcgttgatgaacaattagccgctttaaaaaatgaaaacttttcaaattccaattatcaaattgtaaaatttaaagaaatgattcaaatgttgttatataataacgcagcatttttaacaacagacaacgatttaaaaatatacacagacggccaagaaaaatttgatgacttaatacaagacatccgtaatgctactgattatattcattttcagtactatattattcaaaatgatgaattaggtcgtaccattttaaatgaacttggtaaaaaagcggaacaaggtgtagaagttaaaattctttatgatgacatgggttctcgtggactgcgtaaaaaaggcttacgcccgtttcgcaataaaggcggacatgctgaagcatttttcccatcaaaattacctttaattaacttgcgtatgaacaatcgaaaccatcgaaaaattgttgtaatagatgggcaaattggatatgttggtggttttaatgttggtgatgagtacttaggtaaatcaaaaaaattcggctattggcgagatacgcatttacgaattgtcggggatgcagtaaatgcattgcaattacgatttattctagattggaattcacaagccacacgtgaccacatctcctatgatgatcgttatttcccagatgtaaattctggtggaaaaattggcgttcaaatagcttctagtggtcctgacgaagaatgggaacagattaaatacggttatttgaaaatgatttcatctgctaaaaaatcgatttatattcaatctccctatttcatacctgatcaagcctttttagattctattaaaattgcggcattaggtggtgttgatgtcaatatcatgattcctaataaacctgaccatccgtttgttttttgggctactttaaaaaatgcagcatccttattagatgctggtgttaaagtatttcactacgacaatggctttttacactcaaaaacacttgttatagatgatgaaattgcaagtgtgggaacagctaatatggaccatcgcagtttcacattgaatttcgaagtcaacgcctttatttatgaccaacaaattgccaaaaaattaaaacaagcttttatagatgatttagcagtatcttctgaattaacaaaagcacgttatgctaagcgaagtctttggattaaatttaaagaaggtatttcacaattattgtcacctatcttataaaatagaaatatgaggagtgtaactttaatgcaacaatcagacatcattagtgcagccaaaaaatatatggaatctattcatcaaaatgattatacaggccatgatattgcgcatgtatatcgtgtcacagctttagctaaatcaatcgctgaaaatgaaggtgttaatgatactttagtcattgaactcgcatgtttgcttcatgataccgttgacgaaaaagttgtagatgctaacaaacaatatgttgaattgaagtcatttttatcttctttatcattatcaaccgaagatcaagagcacattttatttattattaataatatgagttatcgcaatggtaaaaacgatcatgtcaatttatctttagaaggtcaaattgtcagggatgcagatcgtcttgatgctataggcgctgtaggtgttgcacgaacatttcaatttgcaggacactttggtgaacctatgtggacagaacatttgtcactagataagattaatgatgatttagttgaacagctgccaccatctgcaattaaacatttctttgaaaaattacttaagttagaatctttaatgcatacagatacggcgaagatgattgctaaagaacgtcacgactttatgatgatgtacttgaaacagttttttacggaatggaattatcacgactagacattggagttgtagtatgatgatgcgatgtaatggcgtattgttgtggaagcttggtgtcatgccatgttactttgatgtgctggtgctacgatgcgacttgatgtagtgctatgatgcggcgttgcggtgttatggtgttatagcccggtttggtgttgatgccatgctactttgatgtgctgttgtggaagcttggtgtcatgccatgctactttgatgtgctggtgctatgatgcgacttggtgtagtgctatgatgcggcttgatgtagtgcaatgatgtggcgttgcggtgttatggtattatagcccggtttggtgttgatgccatgccgttacgattctatgatatgttgtcgggacgttgcaatgtgtattttgccgttgtgactttattatttcacactgttacatgtattagtgaattgctgtggaaatgttgcgacatatactgctacactgatgaatcattgtgtcaagatgacattgcaatgaagaatagcaattctgttattaaccactttttacatactgaaatctcgttaatattatttcaaataaaaacagcagtaggatgactttcacatttgaaatcatcttactgctgtttctatttatcacatattgtataatgtgacactatgtttcgctattgaagcgaaaaataatgtgcgccctataaagttaaaattatcttcaacttttagggggcacattatttggacttgctaaggttatttctttttctttttagacactacttgtgtgtttttgccttttttattgctgccgccgttgtgctctctttcatacgcttcaatgaaaggttgtacttcttttttagcgactttttcataataaatgtttgcaaagtgtgtttgaactacaaggaacgccgcactgactgaccagtacaaaccaagtgctgatgctgagcttaatgaaatccagataatcataattggtgaaatgaccatcatcatgtaacccatttgacgttgttcgtctggcatcgttttacttgatacatatgcttggataaagtataaaacaccggcaataattgtaatccaaatatcaggacgtcctaaatcgaaccataagaagtgtggatatttaaacaaaccatctacaagttggtcttttagtacaaagtataatcccatgatgattggcaattggattagcattggtaaacaacccaacatactcttaatcgggttcatgtcatactttttatatacttgtattaattcttggtttgcagccattttttcttcttgtgtacgcgcacgtttcactttttcttgaattttttcaacttctggctttgcaactttcattttttgacgcatcatatgactatttttatagtttgacaacatgaatggtaataaaataatacgaattaccaatacaaggataataatagctaaaccataattgtcgtttaataagttatttcccaaccaatccaatacatttttcattggatctacgaatgtattgtagaaaaacccactacgtttttcaggtttagaatagtcacaaccagccaaaaagaccataatacctaaaaataatggtagtaacgcttttttcttcatttttccacctctatcattatattcacataggatttattctatcacattaatgagtacgtatgaaacaataagtggaaaaatttaactaattattaaaaaaatctttgaatcgattaacagtcttttcaatattttcacttttagaaatggctgaaatgactgaaattccattggcacctgcttctacaatcggcgccacgttactagtatttataccgccaatagctacaatcggtagttgcggattcatttctttaaatgttgcaatcatttctggacctactggtgtatgcgcgtcatgctttgacggcgtaggatagattggtccaacacctatataatcaacatgagttaaatcagattttgcatactcacctaaatcactaatacttagtccaataattttatcagtgaaatattgtgctatctctttgactttcgcatcatcttgaccgacatgtataccatccgcgttaatttcttttgccaaggatacatcatcattaacgataaaaggcacatcatattgatgacagagatgctgtaattctttagctaatacaagtttatcgtttccttttaaagctgattcacccttttctcgaaattggaaaagtgtaatccctgcctttaatgctgcttctaatacttcatgaatagttcgatgactcggaacatcggaggtcccacaaataaaatacacatttagatacgattggttaaacatattattccacctcttgaatgcaaatccgttgttgataggttgtttcatttaaatgatataacgtatcaagcaacaatggtgaaaacgtaccaggaccaccacaattttcattttcagcagctacctcagcagcaatattaaatacgcttaccgcttcaattaacgcttctatgtctggttctgtttctctaaataaaaatccagcaataacgcctcctaataaacaaccagctccagttactcgtgctaataatggagatccattagctaatacgatggctttatcaccttgaacaataacgtcctctttacctgtgattactattgcagttttatatattgcgtaagcctttttcgctattgcaaccgcatcaagattagcatcactatctgtacctttcatagttgctgtatcgtcaatcaacgctaatatttcagatgcattgcctttaattactgatactttcgctgatttcaataataatttacaaaattgctttcgatatgtagaagcaccaacagctacagggtcaaatacaataggtaagcctgcctcatttgccgtttgagcaatcgcaataatatcttgttcattttgtgctgttaaagtaccgatattgattaatagcgcttgtgcaactttgtaaaattcttcagcttcttcgggagcttcactcattgcagggctcgcaccaatacttaataaaccattcgctgtaaaatttttaactacatcgtttgtataacaaattgttaatgggttttcaatacgtattttatttagataattcatcgtctaatccctctttctttaaatatgcaaaatgattcactggacctctaccacggccgatttcaggcgtatattgtatactcattgaaataaactttttagccttgtgtacagcctcaaataatggtctaccttttgcaagttctgccgttataactgctgaaaatgtacaccctgttccatgcgtatgttttgttttaaatcgttcattttcaaatgtttgaacatcttctttagtaaataaataatcttttgctatatcagtatcatttgaatgaccgcctttaatgatgacacctttactaccaatatcattaataaagatgcggccagcctgcataattttttcttcactatcaatggttagtcccgttatttcttcagcttctggtaaattcggtgttactacatcagctaatggcaataacgtatgctgcaagttttgttttgtgtcattatccattaatgaatcaccgcttttcgccaacataacaggatcaattacatacggaatagattcatgttgcattaaataatgacgaatcgtttccatagtatctgctgtagcaatcatccccgttttaatagcatgcggtaaggtatcattgaagacactatcaagttgttcatctacccattgatgatttaaattatgaatatgttgtacgcccaatgtattttgagcaacaatacttgtaacgacacccataccatatacaccacatgaatgaaatgattttaaatcagccattacgccggcaccacctgttggatcagtacctgcaatggttaatgctattttaggtttaatcatttactttccctccaaattcccattgttctagtgtcatagccatattgaaaaatcgacgctcatgtatgcaactttctaaaaatacttgcttcacttgttccaattccttgtcagacattgattcggctaatttattcattaatgcctcaaatacgttaattatgtcatccatttcagtactataaaaatcaaaccattttgccgtatctttttctctattaagcttatgatcactttgagagcgcttagctaattctgcataaatatatggacaaggtgccattgcagcaattgtataaatagcattttcacgactatgcgcttggaaatacatatgttttatgtaatggtcgccacttggaggccaaacttttgttttaatgatttcttcgtatgattcaccaacaatttgcgctaaaatatcatgcgcaagtacttcaccttcaaccataaattctatttgctctactaaaaattttacgtcattcatgctattcatttttggaattaacaaagcatataagtttgtaaattcttttaaataagctgcatcagcttgtaaatagtgacgtaatgcatcagcttgtatattgcctaataacattttttgaataaagtcatcctcataaatatcattaatgattggctttgcagcttggtacaatttttgtgaaaattccattgtaaaaaatcctccctaaataaaaaaactacttccaacatgaaagtagtttgatggcaatgttgctatactagccccatcacttcaataactactttcctacgttggtactaaccaaatcaggtcataagggtctgaacagttcatctcagccatatcattaggctcccctagtagttccttagtattcaattgcaaattaatcttagcaaacggtttcaacattttcaattattgttgctcagttgtattattatctttaaataataattctataattatatatatttgcgaaataaaaaagaccggaacatatcgagaattccccgatatattccaatctaaaagttacttatataactattggttagctatgcataaatggcttatgcagtaacccaatgtccagcgccaccagtgttatataattttactgctgcggcatcttgaacactttcaggagcatttgctggtgatacacctttgtatttagcaggtgctactgaatcccaagttgattgtaagaattgatacttaccagctgcacctgatgttggatttacagcatgaatattgccacctgattcacgttgagcaatttgttttagatgatcattcacatttactgatgaaccttctgatgcttttgattcagttggtgttgcagtaacttgtgaattgtttgatgttgatgcttgtggttgttgagtttgagcattttgtggtgcttcaacttcttgtgattgtacttgattagcttgattagctgatggtgcaacattattagttgcaggtgcttgtgcactcatgtctgctccattagcacctgttgcatggtaattccaagcaaagtgtgtaccatctgattcaaagtgataagtaaacccttcatagtcaaatgtataattataagcgccagcttcaattggtttttgatttaatgtttgatcatttgattgcgccatttgcgctaaagatgctttatttaagtccgcttcacttgcatgggcttcgtgacctgcatttcctgctacgattcctaaacctactgctaatgatgatgcgagtaatgttttcttcataatcttaaaatcctcctacaagtaatttgtttctctaaaagttttacagagactactgtaacatctgtaaaatccgtgcaggttacaacaaaataaaaaaatagccttgttttttacacagtgattacaacgaaatcccccataatttcagatatgattctatcgagaattgttatgacagtaaaaatgtttttcatttgcaattttttatgtaatcgttttgcaatctatgtctattttctattagaaaaactacacaaaaagacgacctacacaacagtactagtcatgtaagtcgtttttaagtgagtatatttcaagttaattagatctataaaaaatttaggatggattaaatgtatattaaggatgtttaggataattggatttaaatttctaataagtcatgattatctatattttgagagtcaatatctaaaatactatctgagagaatttcattattttgggatttaggggacataaattttattgtttcaacatataattcagtgacaaagtgtgtttgtccgtctttatcatactttcttgatctcatttgaccagttataccaaccaatgtaccttgattagtatatttttctatattagaagctaacttgccaaatgctttacagaataagtaatcacagacgatttctccattttcatctttataatttcggtgcgttgcaacacaaaacgttgcaatttttctatcctccttttcaaatatttgtgcgtctttcgtcagtctcccgacaattacgattttatttagcatgtagtgtgtgattcacctcctatgcctatatcttaattactagcttaaaaatggtcaaaatggcaaattttatataattaatagctatagcatctcgttatttgttatatttaaagaaattagtcatgaaatgaccttaattcttctaattaattcaaaaatcataaatattaaactaatgggatgtgggaatatgaaaacttttaaagcagtaaggtttcaaattgtaaatgaacacggcagaattatagaatatgaattagaagatggcgtaataattaataaagaggaaagtggcacgggttggttgcttgaaattgtcatttctaatgagcattatgaaacatttaaggaatatcaagacaatgaacagttattggatattcgtgtcgtcatcacgcgtccagccaatgatccagctttatttgaatctactgtgaaaagtattaaaaattttaaaacaacaatgtctatcgtatttgaatgtcatatttacactttacgtcaacagtatgctgaaagtttattagaacaacttattgatgatggattatctggtgaagaattaaaaaaatcatttaatcgaatgatgcagtctaaaccaaagttaaaggatgaaaaattagaagagtaaaataaaaaacattcaaagattatgccaacacattaaatctttgaatgttttttgttttattttacatcttgaattgcaaatgtaagttcacaactacaagcaagttgaccatcgacagtagctttagcattacctttaccgattggtcctttaattttagtgatttctacttccaacgttaaagtatcaccaggtactacttgacgtttaaaacgacatttatcaatacctgcaaataaagcgattttacctttattttcttcactatttaaaatagctaccgcacctgtttgagctaacgcttctgtaattaatacacctggcattaccgcatactcaggaaaatgtccttgaaagaacggttcgtttcctgatacttgtttaatagctacacaacgttgaccttcttcatattcaactactttatcaattaataaaaatggctgtctgtgaggtataatttgtttaatttggttataatcaaaaattgtttccatggttgaaatcctccattatattaatttactgaattaatcgttaatacgttcaatgtctgcacctaattgcttcaatttgccatgtaagtcaacatatcctctatctaaatgattcaattcagtgacacttgttttaccatcagcaactaatccagctaaaattaaggctgctgctgctcttaaatcagtcgctttaacttgcgcaccttgcaattgacttttgccttcaagttttgcactgcgaccttcaacattgatgttcgcgttcatacgtttgaactctgcaacatgcataaaacgattttcaaatacagtttcagttactactttatgtccgtttgctgttaataataatgccatcatttgtgactgcatatcggttgggaaaccaggatgcggtaatgttttgatgtcaacaggctgtaaatctccttcagctcttacacgaatgccgtcttcttgatagtccaattcaacgcccatttcttctaatttatacactaaactagccatatgttctttgattgcaccacgtacaaaaatatcgccacgagtaatggcaccagcgattagtaatgtgcctgcttcaattctatctggaatgatagcatgttctacaccatgtaatgattctacaccattgattgtaattgtgtctgtaccagcaccagtaattctaccgcccatttcattaatgtagtttgctaaatcgacaatttcaggttctttagctgcattttcaattaaagtcttacccttagctaatgatgctgccataataatattttgtgttgctcctacacttggaaaatctaaatgaattgatgtaccttttaatccatctttagcattagcataaatattaccattttcaagatgaatttctgcgcctaaagcttcaaaacctttaatgtgttgctcaatcggtctacttccaattgcacaaccaccaggcaatgcaacaatagcatgtcctagtcttgctaaaagaggtcccataactaaaatacttgcacgcattttactaacatattcatatggtgcctcttcatttagagtctttgttgcatcaacgacaacagcgttttcgtcctttttgtatgtaacgtcagcatttaaggttgttaatacattatttattgtttctacatcacttaaagctggaacattaactaatttgctcggtttatcagaagctaataaagatgctgtcaatattggtaatactgcatttttagcaccttctactttaacttcacccgttaatttatttccacctttgataactattttatccatcgtaaatcctccacttagaactcctattactttacatttccctattttaaaattattttaagtcattatttaattatatctagttttgattacaaatcatagagttagacttattttattaaatattttacctgcgtcgagtattgtaacaaatctacaataaaattgcttactgcagtgcctaataaaatagcaacaaatatcatacacacttgtaattgagtggcgtatccttttttaaaaaattgatctaatctaattgattgtaaagcccaataggcaatacaaatacatacaacatgtaacactaaatggataactgcatattgtccgatataatccattttatcacctcataagattactgtattacattgtacatgaaaaatttaaataatgatacaaagtttaatacccgtttttagtaaagtttaagctaacttactatataattctttttacataaatatcataactataaagtatcttggcatgaaaaaatgtagctactttcaaaaaatgaaacgtcgactgtagaagtggtgaaaagaaattttgattttagcaatctattagtgattgtaaaaagtaaaactattcttgagagtcggacataaatcaatgtctagactctatagtgttatatttggcagtagttgacggggccccaacacagaagctggcggaaagtcagcttacattaatgtgcaagatgggggcggggccccaacacaaagaaatactttttctttagaaattagtatttcttatacatgagttttactcatgtattcctatttttaaatacacattagctgtgtttaataataaggaaccactacatcataaatctttaatggttctttatcaattccttctcccctctcaagttttgtatttttaaatcaatataattcaaaaaaagggtcgaagatatgaaatcacatcttcgaccctttatttactattttaattcagccacacgcaaacggttatttgctctctctaaagctctttcggctctatgaatatcagtattgtcgtcatcattttccaagtgagactctgctcttgctttggctaatttagctctttcaacatcaatttctcttgcagtttctgcagtctgaacaatgattgaaactttatcttttctaacttcaacaaagccatcgcttacagcaatatactcagttccatcgtgaaatttcacttttacaaagcctgtttttaaagcagctacagttggaatatgtccactcatgacacctatctcaccagctgttgtttgcataacaacgagttcaacattatcacgattgtaaacagaaccattaggagtgacaatatctaggtttaatgtattcattatccattcctcctaattgttatacttcaacacccatatctttagcttttgcaataacatcatccatgctaccaactaaacggaatgcatcttctggaatatgatcatatttaccatctaagatatctttaaagtttgcaactgttgtcttaacaggtacataagaacctttttgaccagtaaattgttccgctacgtggaagttttgagataagaagaattgaattctacgtgcgcgttcaactgtttgtttatcttcatcagataattcgtccatacctaagatagcaatgatatcttgtaattcacggtatttttgaagtgttgattgtacatcacgagctacttcataatgttcttgacctacaattgatggttccaatgctcttgatgtagacgctaatggatccacggctggataaatacccatttcagttaatttacgttctaagtttgtagttgcatctaaatgggcaaacgctgtcgctggcgctgggtcagtatagtcatcggcaggtacgaataccgcttgaatagaagtaactgatcctttagttgtagacgtaatacgttcttgtaattgtcccatttcagtagcaagtgttggttggtaacctactgcagaaggcatacgacctaataatgcagatacctcagaaccagcttgtgtaaatctgaaaatgttatcgatgaataataatacgtcttgaccttgttcgtcacggaaatattcagccattgttaaaccagataatgcaacacgcatacgtgcaccaggtggctcattcatttgcccgaataccatggctgttttcttaattacaccactgtcactcatttcgaagtataaatcgttaccttcacgagtacgttcacctacaccggcgaatacagaaataccaccgtgctcttgagcgatgttgttaattaattcttggattaatactgttttacctacaccggcaccaccgaacaatccgattttaccacctttaatataaggtgctagtaaatctactactttaatacctgtttctaaaatttgaacttctgttgaaagttcatcgaatgctggtgcttgacgatggataggatcgcgtcgaacagaatcactaatttcttctttaaggtcaattgtttcacctagtacattaaatacacgacctaatgtttcgtcaccaacaggtacactaatttctttgcctgtatcttttacatccatgcctctttggacaccatcagttgaatccatcgcaattgtacgaacaacgtcgtcacctaattgcagcgcaacttctaatgttagttgtattgtaccttcttctttaggcacatcaataaccaaggcgttattaattttaggaacttcgttatgttcaaatcgaacatcaattacaggacccataacttgagttacacggccaattcccatgctattttcctcctttaaatattattcaagcgctgcggaaccaccaacaatttcagtaatttgttgcgtaatttctgcttgtctcgctctgttatattctaatgataagtcatcaataagttcagttgcattatcagtggcatttttcatcgcagtcatacgtgttgcatgctcacttgcttttgcgtctaatattgttccgtaaatcaaactctcaacatattgaggcaagattacacttaagatagattctttatctggctcaaattcataagaagacaaatgaccatgtcccttactagaatcctcttgagataatggtaatacttgtctagatgtaggcttgttttcaagaacgctgacataatgactatagtatatatttaattcatcaatttcttcttcactgtataagtctatagcatggttagctagtgcttgaacagatttgaaagaaggttgatcaggtacgtctacttgagaatactcaatgtcataacctctattttttaggaaatcaacaccttgttgccctaaaactacaatactgtattcgctactatcttgatgtttcgcttcaatatcagtaatcaattttttaagcacgtttgcactatatgcacctgctaaacctttatcactcgtgataactaaatatccacttctagtaattttacgaggtcttagcattggatggtttgtattgctacttgcccctgcaactgcagtaattgcatcttgcattttatccatatatggtgtgaattgttttgtatttttttcagctctacgaagttttgaacttgataccatgttcatcgctttcgtaatctgcttcatttttttggttgattttattcgagtatctatttctttaagagaagccactatctcaccaccttatactaaacttgtttattattcagatttgctaaagctttttttgaattcgttaattgctgtgtcaaacttctcagcatctggtaagccaccagtttctctgatttcatttaacagttcagtagcatttgattctgcccagtggtttaactcgtcttcaaaacgtgtgatatctacaactggaatatcatctaaatatccttttgttaatgcataaataatcaacacttggtgttcaactggtaatggtttgttttgatcttgttttaagacttcaacagtacgtttaccacgttctaatttacttgcagtaaattcatcaaggtctgaaccgaattgtgcaaatgattcaagttctctgtatgacgctaagtcaagacgtaacgtaccagcaactttcttcattgctttaatttgtgcagatccaccaacacgagatacagattgtccggcattaatcgctggtcttacacctgagaagaataaatcagattgtaagaagatttgtccatctgtaattgaaataacgtttgttggtacataagctgaaatatcaccagcttgtgtttcgataattggtaatgcagtaattgaaccgccacctaagtcatcgtttaattttgctgctctttctaataatctactatgtaagtagaatacgtcacctgggtatgcttcacgacctggaggtctacgtaataataatgataactcacgataagctgctgcttgtttagttaaatcatcataaacgattaaaacatgtttaccgttaaacatgaattcttcacccattgttacacctgaatatggtgcaatatataataatggagaaggttcagaagctgatgctgctacaacaatagtgtagtctaaagcgcctgcttgtcttaacttttcaacatttgctcttactgttgaatctttttgaccaatagcaacatagatacaaatcgtaccttgatctttttggttcaaaattgtgtcaattgcaattgttgttttacctgtttgacggtcaccgatgatcaactcacgttgacctctaccaattggtactaaagcatcaattgctttgatacctgtttgtaatggctcatctactgatttacgatccattacaccagtagcttttttctctactggacgtgttttagttgtgttaatcggtccttgtccatcaataggttgtcctaatggattaacaactcttccgattagttcttcacctactggtacttccatgatacgaccagtacgtttaacttcgtcaccttcagtaatacctgtgtatggtcctaaaataaccacacccacgtttgactcttcaaggttttgggctaaaccaagtacgccgttatggaattctactagctcaccagccataacgtcatttaatccgtgaattaatgcaataccatcaccaatttgtaatacagtacctacatcagttacggacatttctgactcataattttcaatttgtgagcgaagtaatgcactgatttcttcagcttttatggccatctatgtcactcctctttataattaattaactcttctaaattttctttgtaattggacaagatcatttctaacactaccatctaatacagttgtgccgactttaactctaaatccaccaattaaatctggattaatttttgtatctacaataattttagataacttcgtttgttgagttactagtttgacaatcttatctaactcttcttgactcaattcatatgttgactcaattgttgcaaaatcttgattgtagtgtccgttatataagctttggaacgccttgaatacgtcagctattaatgagatatgtctattatctgctaacacgtacatcatatttttaatgtatggattaatgtcagtaaatacaccattaatcaactcacgacgttgttctgctgtttgagttggattactgtcaaccattttcaattgctcaattttatcttttactgcttcatttataactgttaattcttcattaatagtttctaaattatttgtatctaatgacacgtcaaataatgctttagcatacttgttagctacttttaccattatttatcgcctgcctcttttagatacttgtcaaccaatgctttttggtcttgttcagaaatttcttttctaagaactttagaagcaattaacactgatagttcagatacttgattattaatatctgcaatggcacgttctttttggctattgatttcactttgtgctgtttcaatcataccgtttgcacgtacgtttgcttcatgaataatttgttcttgctgttgacgtgcttgaaccttagcatcttctaaaatcttttgaacttcttcttgtgtttctttaagtttttgtttattttcttcttcaagtttctgtgcatttaacttagcttgttctgcgtcatcgatatctctgttaatatctctttcacgtttatccattacatctttcaatggaccccatgcgaactttttaagtaacgcaagtaacacgatgaaagttaggacctgtacaatcacagtaccccactcaacgcctccagctgcaccaagaacgaataagttagctgtttcagtcacgggttcatgacactcctttcattaaaataatcgctagtgttatatagaaaaaaacgacgaggttaggacctactgaatttatgcgataggcatggtgcgttcatatctcaactatttaataaagttcaaagatattactatatatgcatcatgaattatgtcctatgcgctttgtcccgacctctttttatctgttaattatccagcaaatgtcatgaatgcaattactacaccgatgataggtaatgcctcaactaaacctacaccaatgaacatgatacccattaattgaccacgtgcttctggttgacgtgctacaccttcaactgttcttgaaacgattaaaccgttaccgatacctgctcctaatgctgataaaccaattgcgattgctgctgcgattaaattcataatttaatttcctcctgtgattgtatataattattgaaatttttagtgttcatctgccactttatgtgacatataaaccatcgaaagcataataaagatatatgcttggattgttcctacaaatattgaaaatgcttgccaaacaattaatcctgggatactaataatccaaccccatgctggttcgttaaagaataagccagcaagtaatgttaatagtatctcacctgcaaatatgttaccgtacaaacgcagaccaagcgttaatgttgaagtgaactcttcaaaaacattaataattgccaatggccaaaacggctgtacataacctttaagatattgtttcgtaccacgcattttaattccataaaagtgagttaacagtattatcgttgtagacaacgttaaagtcactgttgcatcagctgttggtgatttccaccacaatgtgtgatctttcgttactatagaaaacggaagacctaacatattagctataaaaatgtacagaatcagcgttactgctaagaagtggaattgaccaccttttttccaagccatgttaccttcaatgattcccctcacgaaatcaaaaatccattcaacgaaattttgtttgccagttggtctttttttcaaattacgcgtacaaatgatagcaagtagaaaaacaagaaacgccgtaacaagtatcatcaatatacttgataaattgaaaacgatatcaaaaccgaataaattccaactcacgagcggggatttgtgatccataatctcacctctttcttaatttatttgctcacctttagtaaaggacgtatgataactacaacatatgaaatcattaaaccaacaattataccgattatacttacatgcgctttattaaagtaccaaatcatacaggcaataattgcaactaagtatcgccacatatttccagttgaaatatgcaaagtgtctggtcttttagctttagctaaatagcattcaaaaatacatgtgttgattgcagaaccagtaacaccaatgattaatcctaagataaatgcatggtgtgtataaaggtataatcctcccaatattattattagataaaaataatattgaatgaactgtttaaaaatgttgtagaaacgactcattttatatgcctccgtgtgactgatatcaatcatgaaaaccgttccactcatacaaactaaatgataatataggcgatttgtggtgtcaattctattcaaattgttgtaaaaaaataagcatagttagacacaatttagacacaattagacaaaaagtctattttcctcagaaatcgcttggtttttcagtgattaaattcaaataatacttaatatgattaactattctttctgaagcaaatccatcaccgtaaggattagatgcttcagacatttgatgatataatctctcatcatcgattaattcttttgcagcttgatacacattttgcttatttgttccaatgacttttaatgtgccagcttcaacaccttcaggacgttctgtaacgcttcgcaaaactaaaactggcttattaaatgatggcgcttcttcctgaattccacctgaatctgtcaaaataaaataagattttttagcaaaattatggaaatctactacgtccaaaggttcaatcaattcaattctgtcatgactacctaaaatcttttgagccacctctcgaactttcgggtttttatgcattggatatactagtgctaaatcagtatactcatctattaagcgtctaaccgctttaaatatattttccatgggttgcccgatattttctcgtcggtgtgctgtcataagaatgaattttttgtcatggtatttatccataatgttagatttataattgtcatcaactgtatatttcatagcatcaatcgctgtattaccagtgacaacaacactttctgaatatttcccttcacttaacaaatgcgatgcagcatttttagtaggtgcaaaatgtaagtcagctaatacaccaactaattgtctattcacctcttccggaaaaggtgaatatttatcataacttctaagccctgcttcaacgtgtccaatcggcacttgattataaaatgccgctaaaccacctgcaaatgtcgtcatcgtatcaccatgtacaagtaccatgtctggtttttctaattgaatcacttgttctaattgagtgattgatttagaagttatctcagaaagtgtctgtcctgatttcataatattcaaatcgtattttggtttgatttcaaaggtacttaatactgaatcaagcatttctctatgctgtgctgtaacaacaacaattggctcgagcattttttcttgttccaaagctttaactaaaggagccatctttatggcttcgggtcttgttccaaatatggtcataatctttttcatcaaactacttatctccgattcttctatttagtaccaaacaatctatctccagcgtcgcctaaccctggtgtgatatatgctttgtcatttagcttttcatcaagtgcagcaatataaatatctacatctggatgtgcctcatgcatcttttctacgccttctggtgctgcaattaaacacatgaagcgaatatttttagcgccacgtttcttcaatgaagtaatagcttcaattgctgatgcgcctgttgctaacataggatcaacaacaatgatttgtctttcagtaatatcttgaggtaacttagcaaaatactctacagcctttaatgtttcgggatctcgatacaaaccgatatgtccaactcttgctgcaggtactaaacttaaaataccatcagtcatacctaaaccagctcttaaaattggaacgatagctaattttttaccagctaatcgtttagccgtcattttagttacaggcgtttcaatatcaacatcctgaagctctaagtctctagttacttcatatgccatcaacataccaacttcgtctacaagttctctaaattctttagtacctgtatttacatctctaatatagcttagtttgtgttgaattaatggatgatcgaaaacgtgtactttactcataaaaattactcctatctttgtgtatgtttattgatatagaggatattcagctgttaatttcgcaacgcgttctttagcttgttgtaatttttcttcatctttactatttttcaatgctaaactgatgatttttgcaacttcctcaaaagctttttcatcaaatccacgcgttgttgcagcaggtgtacctaaacgtataccactcgttacaaaaggtttttcttgatcgaacggaatggtatttttgttacatgtgataccaactgaatctaaagtctcttcagcttctttaccagtaagtcctatagacccttttacatcaacagctactaagtgattatctgtaccgccagaaacaattctaaatccttcattaattaatgcttctgcaagaacttttgcgtttttaaccacttgttgttgatacgttttgaaattattttctaacgcttctccaaaagcaactgcttttgctgcaataacatgctcaagaggtccaccttgaataccagggaaaattgttttatctatgtcttttttatattcttccttacataaaatcataccaccacgtggtccgcgtaatgttttgtgtgttgtagttgttacaaaatcagcatattctactggatttggatgtaaacctgccgctactaatcctgcaatatgtgccatgtctaccattaacttagcgtttacttcatctgcgatttctttaaactttttgaagtcaattgttcttgaatatgctgatgcacctgccacaataagcttaggcttatgctctaacgctaatttacgaacttcatcataattaattcgttctgtgtctttatctactccatattcaacgaaattgtagaatttaccactaaaattaacaggcgccccatgtgtcaagtgaccaccatgactcaaattcatacctaaaactgtgtcgcccatttctaatgcaactaagtaaacagccatgttcgcttgtgaacctgaatgtggttgaacattgacatgttcagctccaaacaatgctttagcacgatcaattgcgatgctttcagtaacatctacaaactcacatccaccataatatcggcgtcctggatagccttcagcatacttattagtcaacactgaaccttgtgcttccataaccgcttccgatacaaaattttccgatgcgattaactctatgttgctattttgtctctgaaattctctctcgattgcttctgcgataactttatcttgcttggtgatataagacataaaatctccccttctttcaaaaaaacttattggtatttagcacgttcgccaccaatctttttcggcctagatgtggcaatagttacaattgcctgtcctacttgctttactgaggtccttacaggtacacatacatgtttaatatgcatgcctattaatgtttgaccaatatcaattccacaaggaacagtaatatgttcgaccacgatcggatccttcatatgctgaaaagcgtatgttgccaaactccctccagcatgtacatctggaacgacggaaacttcttccattgttaatggattaaactgagatttttctattgttatcgctctgttgatatgttcacatccttgaaaagcaaaagtaacgcctgtctctttactcacaacatctaatgcattaaaaatagtttctgcaacttccatcgaaccgacagtccctattttttcgcctatgacttccgatgttgaacatccaattaaacatatatctcctttattaaaaaatgacatatcttttaattcgtctaataacattgtcaaatctttcataaaagcccacccttcctaaaaataaaaaaggaatatagcaaagtgctacactcctctattataacttatttaactgttaacatatactaattatacagaattcctactagcaaataatatcttttaattttaaaattaaacttacaagttcttcataggtatgtacatacatttcttttgttccgccgtatggatctataacttctcctgcttcttttacatattcatgcaatgtgaaaacatgattttgcaaaccaaagtgtgcctctattaattctttgtgcgaatacgacatcgtcaaaataatatctgctttcaaatctgcttcagtaaattgttgcgataaggtcgtttcagctaaatgatgttcttcaactaagtcttcaacataattcgaaacaccctgattgttcacagcgaatatacctcttgattcaaattgatgatttggcataacctcttttgcaatactttccgctaatgggctacgacatgtgttacctgtacaaacgaataaaatcttcatagttcacaccctttaataatgtgattacctgcagcttttaacatgcgattcataattgcttctgtattatcattcagctcaaagccgtatatatacgcagctgaaatattttcattttcatcaagtgaatgtaacacatcataaagattatgacttgcttgtttaacatcattgtcatcctgacataattgaatgaattgcgcttcacttggtataaacgccgccttattactcggcacaataaaagctatataagaccaatctttaccgtcatttccaattttgctctcaatatctgtaataattgtaagtggtgtattgggtgagtaatgcttatacttcatacctggtgcaattggctgttcagtatcattataatcagcatgggcgatactattcggaagtatatctgtaatcattgctgctgttatagaaccaggtcttgcaattttataaggaaaagatgtgcaatctaaaaccgtactttctaatccttcttcactttgttcagcttgaacaataccatcgatacggccattcaaatcttgatatacatgattgaaagttgttggtgaaggtctaccacttaaattagcacttggagcagctagaggttcatttatgatttgtaataattgtctgcctacagaatggcttggcattctaacagcaactgatgataaacctccagaaacttttcgacatagatagcctggctttaacggcaatataaacgaaatagggcccggccagaatgcctgcattaacttttctacgcgtggatccaaagtatatgtaaaatcttttaattgaactttactgtgtatatgaacaataagcggattgtcagatggacggcctttagcttcgtatattttagctacagcttcttcatctgtcgcatttgctgcaagtccataaactgtttcagttggtaaacctattaaaccaccgtttaaaacaatgtcttttatttcattaattttaggatattgctgtaaatcttcattatattctctaacatcccaaattttagtatccaacttaatcacgcctttcttatttatcataatacaaagtaaaaagctatgcacttaactaatcatagcaaaggcataacttctaattaccatttaaatgagacgattcgatcgtggccatttatatctttaataatgtcgatttttttgtcaggaaatttacttaaaattattgatttaagtgcctcaccttgattgtaaccaatttcaaaaacaactgggctgcctttttccataacgtgaggtaaatcttcaatgattgattcataaatagcatatccatggttatctgcaaacaatgcctgatgtggttcgaatctcgtaaccgttggagacatcgtaaccatatctttttcatctatatatggtggattagatatcaagccgttcaacttgataccttctttaattaagggctttaatgcatcccctgttaaaaattgtatttgtgattgatgcttctcagcattattacgagccatattcattgcttcaagtgaaatatcagtagcaataacatttaaatccggcttttcgcatttcaaagtaattgcaagtacaccactacccgttccgatatctacgattgttgcatcatcttctaactgttgtaagaaatgcaacattacttcttcagtttcaggtcttggtatcaaacaatttgagtttacatcaaacgttctaccataaaatgaggcaaagccaactatatactgtataggctctcctaataacatacgttgtaatgctaagtcgaacttcataatcatcgctttcggcatatcatcatgcatgtggactacaaagtccgtacgcgtccattgaaatacatctaacattaaccattcagctcgtgtttgttcaaaccctttttgttgtgttaaatgaattgcttcatctaacttttctttataattcaccattattaagttctttcaatttatctgtctgctctgataaagtcagtgcatctataatttcttctaaatggccttccataatttgccctaatttttgaagcgttagacctatacggtggtctgttacacggctttgtggataattataagttcgaatacgttctgaacgatcaccagtaccgactgctgatttacgttgtgacgcatacttttgttgttcttcttgaactttcatatcgtataaacgtgcttttaacactttcattgctttttcacggttttgaatttgagacttctcagaagatgttgcaatgacaccagttggcaaatgggtaatacgtactgcagagtcagttgtgtttacgtgctgaccacctgcaccacttgaacgatacgtgtcgatttttaaatcttcatttctaatttcaatttctacatcttcaacttctggtaaaactgccactgtagctgttgaagtatgaatacgtccacctgattctgtttcaggcacacgttgaacgcggtgcgcaccattttcaaatttcaatttactatacgcaccattaccagaaactgagaaactaatttctttgtaaccaccatggtcactttcagacgcttctactatttcagttttgaatccttgtgattcagcatactttgaatacatacgcattaaatcaccagcaaaaatcgcagcctcatcaccaccagctgctgctcttatttctacaataacatctttgtcatcattaggatctttaggaatcaataatattttaagctcttcttcaagatttggaagttcagctttaataccgctactttcctcttttaacatttctacttcttctttatcatcagtttcacttaacatttcttcaatatcagctaattcttcttttttagctttatagttacgataaacatctacagttttttgtaaatcagcttgctctttagaatatttacgtaatttatctgaatcatttacaacatctgggtcacttaacagttcatttaactgttcgtatctttcttctacaatatctaattgatcaaacacttataattcctccttattattatcactaggtgctacgatatggtgcgcgcgacaacgtggctcataactttcattggcacctactaagataatcggatcatcgattttagctggtttaccatttattaatcgttgcgttctactagatgaagaaccacaaacagcacaaactgcttgaagtttcgttacttgttcactgacagccatcaatttaggcattggttcgaacggttcgcccctaaaatccatatctaatccagcaacaataacacggtgtccatctgctgatagtttttctactatacttacaatttcatcgtcaaaaaattgcacttcgtctattccaataacatcaacattagttaagtcatgcgtcataatttcacttgctttagaaatattaatcgcttcaatggcattaccattatgagagaccactttttctttatgatatcgatcatcaatcgccggtttaaatacaacgactttttgtttagcgtatatgccccttcttaaacgtcttataagttcttcggatttaccgctaaacatactacctgtaatacattctatccaaccggaatggtaagtttcatacattgagagttccacctttttcaaaacataatcgctttattatatcatatttcaaatattcataaatgtctttttcataattatatcgatattgtacatgaacaattattttataaatttgtcttgcatatttatatacagctattctactttgttcctttttattcgtgcgatttttctactcaatacaaactttaatgaagggggaatttatcattatgtattaacaacatggtattgagtcacttttttgaacacagtcgtaagtatatacccttactacgcttataaataaaaaagctgtctacaattccattattggatgcagacagcttaacgattactatattagttgtttgatttaagaccaaactttttgttgaaacgttccacacgtccatccgcagcagcgaatttttgacgtccagtgtagaatggatgtgaatcagatgaaatatctaaacgaataactgggtattcttttccatcttcccactccatcatttctgaagatgtttttgtagaaccgcttaagaatttgaagtttgtagtagtatctaaaaagattacttggtgatactcaggatgaattccttgtttcattattttcagctcctttgccctgaaccatctggaacagagttatttgtgagtttttacccaatactgtgtaattataaaggtaattaattcaaaacgcaagcccctatataatgtttattaaattataggtcgacccgttttagtactttcttctgcagacttttgtagctgcttgaagaaatcttcattattcttagactttttaagtttgcgaataaatctttcagtaaagtctgttgagtcagtgaatagatttcttaattgccataatgtgtctaattcagatttacttatcaacaattcttctttacgcgttgaacttctgccaatatcaattgcagggaagatacgacgttcagacaatttacgatctaaatgtaactccatgttacctgttcctttaaattcttcgtaaatcatatcgtccatacgtgaacccgtatcaactaatgcagttgcaagtattgttaaacttccacctgcttcaatatttctcgctgcaccgaagaatgcttttggtttgtgtaaagaggcaggatctaaaccacctgataatgtacgaccacttggtggaataactaagttataagcgcgtgctaatctcgttatagaatccattaaaataatgacatcttccccaatttctactaaacgctttgcacgttcaagtaataattcagctactttaacatggtgttctggtggttcgtcaaacgttgaatgaacgacttcagcagcttctactgagcgttctaaatctgttacctcttcaggacgctcgccaactaacaaaataaatagctttgcatctggtttgttcgtactgattgcattcgctatctcttttaacaacgatgttttacctgctttaggtggcgccactattaaaccacgttgacctaaaccaatcggtgttactaaatccatgatgcgcgttgaataattttgtgtttctgtctctaatttaatacgctcatctggataaagtggtgtcaaagcttggaaatgcggacgtttcttcacttcttctgcgttatggtcattaacaaagtcaacttgtaataagccataatatttttcgttatctttaggttttctaactttcccagttactttatccccacgtttaatttcaaaacgacgaatttggctagcagatatataaatatctttttcccctttagaatagttcactgttcttaaaaaaccataaccatctggttgtatatcatctaagataccttccatataatagttaccatctttttccatttgtgcttccataatagctagaacaagttcttttttatttaatttactatagttcgtcaacttaagagttttagctttttgagtgagttccttggtagtataattcttgtacagttcgtggaatgattcatactgaggagatgtacgttctctttcaggcatatagtttacacccatttcattattttttagttagtaagtaatagataggcatgacaatgcataaataactgtgctagcacaatcccattatgctaatccccaaccttttaaatacatgaataactatagcaaatttttattttaattacaaaatctatttataaaaattgcaaaattaaaacagtacacaaaacttaattagtcatgtgcactgttttattgcgatttttaattcaaaaatcaaatttatttaaaatagccagctatagatttcacttctaagaactcttcaataccataatcgccccattcacgacctaaaccagattgtttatagccaccaaatggtaagtctggctttctacctgcttcgtttatttctactgtacctacttcaatagaacgagctactttatgcaatatttctttgtccttaccaataacatatcctgccaaaccatattttgtatcatttgcaatttgaatcgcttcatctaaatcgttataagtgataactgacattactggcccaaaaatttcttcttgtgctatcgtcatttgattatctacattaataaaaattgtcggacgtgcaaagtatcctttttcaagtccttctggtttaccaggaccaccataaaataattcagcaccttcttcaatacctttattaatataattttgtacttgatcaaattgttttttactaatgatagggcctacttgtgtaccatcttctcttggattaccgacacgcacttggctaaattgttcttttaattcagctaagaatgcatctttaattttgctaggcactaaaacacgtgtaccagctgtacatacttgaccagtattattaacaactttgcctgttgttgctttagccgcttctttaatatctacgtcatctaggacgatgtatggagatttgccaccaagctctaatgatacctttttaaagtctttagcagctttttccataattttagaaccagtagggcctgatcctgtaaatgacatcatgcgtactttaggatgttcagataaaggattcccaacgccagcaccatcaccattaacaaggttaaatacacctttaggaacaccgactttatcaaaaatctcagctaaaataacagctgcaaatggtgtttcttcagatggtttaagtacaactggactaccagccgcaaatgctgctgctaattttaatgatgtttggtttgtagggaagttccacggtgtaattaagccagatacaccgatagcttctttaacaactaaatcatctccgcggcgttcttcaaattcgtagttatctaatgcgtctctcgctgcaacaaaatgatttagtcccatttgataatggacacgctcagataatgataaaggagcacctaactcatccgtaatagcttgtacaatatcgtcttttctgttttcatattcttttacaattttatctaataatgcttgtctttctttcacagatgtatgacggaactctaaataaacattgtctgccgcctcgacggctttatcaacatcaactttattacctttagcaactttcccgattacttcttcggttgctggatttataacttctatcgtttcattactattactttctatccattcgccattaatgtactgctttgtgtagtctctcattattctttcactcctcaagaatgatttatatattatttatccgtaatgcatacgatataaacattacattccattatgatacgctcccttttaatatgttcaaaataaaatgctttaaaattttgctgcatctaatttttttatatttttaaataaaaataactattcctacatcatcgcaaataatgcgaagacttagaaatagttataatcaatgctatgtttaaacgtcatgtaattatttagcagtacgttgatccgttaaatcgacatatgattgcgcccatgcttcaattggatgtaaagcctctgctaacgctttacctttttcagttagcacataaataatttgtactggactcgtagaaatgatttgcttctcaactaactcccattgtgcaagctctgacaacttaagacttaaagcacgcggcgttattgttttcaaatctcttttcatatcggaaaagtgtgctgaacagtcattacatcttgagagataattaatgattaatccattccaacttctaccaagtattttaaaagtttcttcgagatacggacatacttccatcatcttcacctctcatcaataaatttagaatgtaaacgaacacccttttttaatcagtataattattataccacaaaacaagataaatctatacagtttccgtccaaatatctgcacctaaagcttttaaatgttctacaatatctgtataacctctataaatatgtttaacattgtaaattgtagttacaccctcagcaattaaaccagcaataattaaacaagctcctgctcttaaatcgctagcataaacttcagcaccatgtaatgttgatggttttatcgttgctgtgccttcgtcaacttcaatatttgcacccatgcgctttaattcttcaacatgtttaaaacgctccggataaatcgtatcagttacaaatgaaggaccatttgccataaataataatggtgttattggctgttgcaaatcagtagcaaaacctggatatactagtgttttaatatcaacaaattgatatggtgcattattattgatgcgaattctttcgtctcttacatcaacattcacacctaattcactaaatttagcagttaatgtttctacatgtttcggaacaatattatttaatataacattttctccacatgctgcagcgatacacatatatgtgcctgcttcaattctatcaggtataacttgatactcagaaccatgtaattctttgacaccattgattttaatcgttgatgtacccgctcccttaatattagctcccatacttgttaagaagttagcaacatcaactacttccggttctttagcagcattttcaattacagtttgtcctgttgcataaactgcagctagcataatgttaattgttgcacctacactaaccatatctagaaaaatatgtgcaccttttaactctttagcttcaattttcattgatgtcgtacttgattcatcaatttcagcacctaaagctttaaatcctttaatatgttgatcaattggacgtggcccaagtggacatcctcccggtaaaccaatcacacattttttaaatctacctaacatggcacccatcatatagtatgaagcacgtaatgattcaactttattatttggtaatgcagcattttgtatttcagttgtatcaacttctaattccgtaccatttagtgatgccttaatatttaaatcttctaataaactcactaaagttttaacatcagagatttgcggtaacccttctaatttcacatgtccttgagctaataatgttgcaggaatgatagctacagcactgtttttcgcgccactgatattaacttccccatttagtgtgcgtccacctcttatttttattacctcttgagccatatcatttatctcctttgtccattactttttaattttttgcattattagcattataaattaattttactttatttgtaaaatagtttattttaatcgttaaaatcttgtctttctattttcgattgattaataacaaatcattcacctttactaatatatgctgttcttccccacttgaccatggtctaaagtctgattattcaactaaatattgacgttgttttgacaattatttagttttaattctacgatttgcacgtaaacttttttcataaattgctcattttccttataattatatcacaatcaattttgatatattttaccatttttacgctttcattttaaaatcaaactgttttatttattacttatacaacataaaaaagaagcaaacaccattttgtctgcttcttttaaaattaatatccctacgttattaataacttaaagactaaatattaattatttagcgcggtttgaagtaccgaactctttaattttacctttaactgtttctttgatagcttcacgtgcaggtcctaagtatttacgaggatcgtaaacttctttgtcgttatttaaaacgtcacgaactgcttttgctgaagcgatttggttttcagtgtttacgttaattttagctgtaccaaatggaattgctttttggatatctttagtcgggataccagtaccaccgtgtaatactaatggtaaacctgtagataaaccgatttcttccatttctttaaatcctaattttggttcacctttgtatggaccatgaactgaacctaatgctggcgctaatgcatcgataccagttttttcaactagttcttgacattctttaggatcagcataaatgatgccgtctgctacaacatcatcttcttgtccgccaacagtacctaattcagcttctacagaaacacctttttcatgagcgtattcaacaacttttttagttgttgctacgttttcttcgaatgggctgtgtgaagcatcgatcattactgatgtgaaaccagcatcgatagcttctttacatttttcaaagcttgaaccatggtctaaatggattgctacaggaatagtgatgtttaagtcatgcattaacccttcaaccattttaacaattgtgtagaaaccgctcatgtatcgagcagcaccttcagaaacacctaaaattacaggtgcattttcttcttgtgacgcttctaaaattgcttgagtgaattctaggttattaatattgtattgacctaccgcataaccattttcttttgcatcaattaacatttctttcattgaaactaaaggcatgaaagttcctccttgagtgcttacgcacgtatttttcaaagtaattatatcaaaaaaatagcgtcaatgcattgaaatactgcagattaaatgtgtattttttgaaaaatgcgatagttatactaaatgcaaacgtatacatttttatacaatttaagccgttgcataatatgtagtcattaattacaatattttataagtagattggaggataaagatgtcaaaaatcttaaacacacaactaataggtatctttaataggctagaaaaacaatctttagaaattcaaatggctgcccaatgtttaattcaagcaattggtggcgaaggttatgtttatgtaaaaggttatgatgatttacagtttttcgaaagtttcattctacatggtgatgagcgtttaaaatctagccgaaaacttgacgctattaaagactttaaagaaattgactcaactgatcgtgtattattattcgcaccattttataatgatcaagttgcattagatattcaaaaacttatcgacttagatatcgatgtggtcttaataagcaacaaacctaaaacagatgatttccctgatcatctcgtacattttatcgatttatctacaccaagacctatagtctatactgaagattacgataagattgtccagccacatgcgatggcattgaattatgtatactatgacatttatacacaaatgattgaaatgacaagagacttagaattataaaagtcactattgttatttaataccttgtcactaacataatattaaaattatacgaaaaaccggtactttcaatgttaaacaatgaaagtaccggttttattagcaaatttatttattttgttgatattttaatgaagcttcaataaatgatttaaaaatcgggtgcggacgatttggtctagataagaattctgggtggaattgacaagcaataaagaaatcatttgtcggaatctctaccatttctactaaacgtccatctggacttgtaccagaaatcaccataccattcgcttctaattgttctctatagtcattgttaaattcataacgatgacgatgtctttcttcaatttccgctttaccataaacatcttgtgccaatgtgccttctttaattgaacatggatataagcctaagcgtaatgtaccacctaaatcttcgatatctttttgttctggtaataaatctataattgggtatggtgttgcagggtctaattcagctgaatgtgcgccttcaaggcctaatacgtttcttgaaaattcaactgttgcaagttgcattcctaaacaaataccaaagaatggtacattgttttctctagcatacttaattgcactaattttaccttcacttgcacggaaaccaaatccacctggtactaaaataccgtcgacatctgcaaggtattcggccgcattttcatctgtaacttcacttgaatcaatccatctaatatcaatatctttagcgaaaggatatccggcatgttttaatgattcaactacagataagtatgcatcttgtaagctaacatacttaccaactaaaccaattgtaattttaccatctaaattattaacgatatctaacaactgtttccattcatcaagctgtgtttcatatttcgcgtttaattgtaaacgtttaataacgatatcatccatattttgttggcttaattgtaacggaatttcgtataaagaatctgcatcacgacattcaataacactttctttattaatgtcacagaataatgcaattttatcttttaaatcttgtgtcatttcatattcagttcttacaacgattaagtctggttgaatacctaagcctcgtaattctttaacactatgttgtgtcggcttcgttttcatttctccagcagctttaatataaggcagtaatgtacagtgaacatacataacattttctctacctaaatcgctacgaatttgacgaatcgcttcaataaacggtaatgactcaatatcacctgttgtaccgccaatttcagtgataacaacgtctgcattcgtactttcccctgcaagtaataaacgttctttaatttcatttgtgatatgcggaataacttgaactgttccgcctaagtaatcaccacgacgttcttttttcaatacgtgtgaatacactttaccggctgttacattcgaaaacttgtttaaattaatatcaataaatctttcgtaatgtcctaagtctaggtcagtttctgcaccatcatccgttacgaatacttcaccatgttgataaggactcattgtacctgggtcaacatttaagtatggatcgaatttttgaattgttacatttagacctctatcttttaataatctacctagagaagatgctgtaatacccttccctaatgatgaaactacgccacctgttacaaaaataaattttgtcatgtcttgacctcctaattattaaagggaatgcttcctcatcaattgtaaaaattacgtaaaacataacattaaagtaagctcattcaagttgtttatttgtcgaattcgacaaaattaaattctgtttacttaccgtttccatactgctatgtcactatgtatatcatttacaactttgattattgcgttatcatttcttgatttactcaattaaataaaaaaacgctccctctcacaaattttgtaaggggagcgtataaattttatacacgtgtcctatttaaaggagcccgaataaaattttatcatctttcaactaaaagtcaaacaaaaaattatgctttgaagtcttcttcgtcttcaaaatcttcttcgtcttcatctagttcatcttcatcttcttcaatgactatatccgaatgattgatttcttcttcaacttgctcatcttcaggatcatttaattcttcttgctcatcagtttgagctggaatatcgtcatcatcatccatttcatcttcacccaataattttaagttttgatcttcttcatcatcggcgtctaaaatatcaaatttttgaattgttggtgcaattttctcttcgatatcatctactgagtaccagtcacgtaatccccataagttttcaccaacatttaaaaaacgtccatctgtatttaaatctgtgtaaaattgtacaacacgagtttcaatttcctcatactcataatcacctaatgctctaaattcatcgatgatatcatataagttcattgtttcacctttatcattcaataatgtataagccatatcaataaatgatttttcatcaaccatttgttttgtataatcttgaattttcattgcccaatacttcctttcgaaggatataatctaaatttatacgtctgaattcatttatatatagtaacaaaactaaattataaatgacaatatcatatttcgcaatcactgttagtaatttaaatatttttcgaaaacgacatagtcatcagtttgttcgatttcaacgaaattactatttagacataatggtttaaaatcattattctctccaaacagaatcatcgtaatcacattaaggttgtcatagttttttcttaagtaagtaggcaattgtcgaagcgcacttgaaccaataccattaaagcgatatgatttatccacttcaatagcagcaatgttcatgcgttcaccaatctgctccaatgcgataaaaccaaccttttggccatcaatcattaaattaatgatatgtacattggtcacttctgaacgactttcttcttcaagctttaatgacgaaacatgttttgaatctaagtccaagtaatatagtcgttctttgccaattggcccttcttctttagttgctgtatgcatgaatccagcacgttcgtataggttccaagcattgtcattttccgcatctactactagatatagatgattaaaatcaggaaatacaccttgaacatattgtggcaatgacatcattattttcgtgccatatccaaaaccttgatatttttcattaatcgataatgaacgaatataaacgacattttcaggtgtatcataaccttcatgctgatagtaacgatgtaatacaaaaaagcccaccacttcatttttgtcgtttattgctacgttagcaatcctatcagcatcattaattgcatcatcaataacttctttaggtaaagatgaatatatttgttgtctttcattcaagtcaaaatcattaattgctgaacgatattgttcatcaaatgcttttaaagtgataccttcaaaacaaagttctttagccatatatttaacccctatctttttatatatgaagcatgaatccccgtattattttacctattatttcactacgataccattatttactctaagttaaataaattacttatttatatttttgcaaattttaaaattaatgtgctattcctcattatttatcattttaatcaaagacttacaaatacactgcgtacgaactacttttaatattacgtcactaactaacaaacctatacaacttcaaaattcctagaaaataatatatataacttaacgtccacgtttgtaatacattaattgcgatacgcttacaatgttgaaatacaatggcatcaaatttgttaataattactattattacttgttttttagtcattttactatactattatttaaggatagacattaataatgaggtgggactcttatgaaagttggcattgacgctggcggtacactaattaaaatcgttcaagagcaagataaccaacgtacttttaaaactgaattaactaaaaatattgatcaagttgtggaatggttaaaccaacagcaaattgaaaaattatgcttaactggaggtaatgcaggtgtcattgctgaaaacatcaacattcctgcacaaatttttgtagagtttgatgctgcatctcaaggactaggtattttattaaaagagcaaggccatgacttagcagattatatttttgcaaatgttggtaccggtacgtcactacattatttcgacggtcaatcacaacgtcgtgtaggcggtatcggtacaggtggtggcatgattcaaggactcggttatttactaagtcaaatcactgattataaacagttaactgacatggcacaacacggtgatcgtaacactattgatttaaaggttagacatatttataaagataccgaaccacccattcccggtgatttaacagcagctaattttggccatgtactacatcatttagatgctgattttacacctagcaataaattagcagccgttattggtgtcgttggcgaagttgttacgacaatggccattactgttgcacgagaatttaaaactgaaaatatcgtttatatcggttcttcatttcataataacgctttattacgcaaagttgtggaagattatactgtgttacgcggttgcaaaccgtactatgttgaaaacggcgcattttcaggtgctattggtgcattatatttaggaaaatagaaaaagaccatttatatgagcgttgttttaaataaacgctatataaatggccttttattttatggtctacgtgttttgaatacgtattgttccatttattatcacttaattacttacaactcaattcaattaaaatgtaagttcattagacaatttttgcgctgaaacaattgtaccaaccacgccagtttttaaatctatcgcaacggctttatgatcatctctaagttcatctagccattctccgaaaacagaaccttcaatcgtaattaaatcacactcttcaaaatcttcatctcgaacttttaacgctctgtttttaatactccatacaggcataatatgcggctttttttcgtcgctatcattttcactaatgagaataaactgcttacttccttttttagttaagccgtatacttcatcatatttcgctacatcttggacaaattctttgattctaattttatctaattccgtcatcacttcttgtgtaacagctacaacgtttagtagatgcccttcttcttccattgtttgattcataataatatggtcttgttcatcaaacaattcatctaattcataagtagcaaaacgatcaacgtccatttttacaactttatcaaatggaatatcacgacttgttaaaaatgatacggccacactttcttctgtccaaacgcctacatacgcttcacttttataatttaggcgtactagttttttatttttagaggcgaaataaatacattcatttattaatatatctctaaagaatggatatgctttataagacatgcttgaccctcactttttaaaatatgtcatacataaaatagtaaatgactccaacaagatagtcaattagacatattatgaattcaatttaatgtcatgtttttcattttaaaaattcaatagcattaaattttacgtatacacaaattcggtctataacacgaaacatatctagttactaaaaatttcaaagcgataacctttaatatacctttatcaacaaaatggcaactcttataacatagtgaaataaaagtcgccatttaatattagtattacaaagtattgccatatcataaatttaattactgttgactagaatcgaaaaaagcttgttacaagcgcatattcagtcaactactggcaacataacattgtagcgccttatgttccgaactctaatagtgttcaagttcagctaaaaatgcgcgttcattctccagtactgtttcttttgaatctccatgccaaatacagccaaaccttgatttaactttatcttcaccgtaccaatcaccatcataataagataacgggtataaactaccttctttgacatatttcaaaatcgtattgaagaaatgtgtgttatcaccttttgaatgataactataaaacttttgatatcctgaattcaactcgtttgcaagcaataacatgctagttgaaccattttgtctaaagtttaaatcaatcgcataaacgttatcatcctcatcgacgagtaagtcaaaaccagccacaccaaagaatccttgattcacaccgatttccataatttgtctacctgcttctataacgtgctctggtacattagtagtattttcatttccgttataaaatccgtacttatccgttaattgcgttgccgcaccaagatattgaatgcctagcgattccgagtatgcaaactgaacgcaataattcgctttttcttcaatcttctgttcgataataagcgaattcgtttcagcagttgcctctttaatacgcgttatcgctttttgtaaatctgtatcatgataacaaatcataacgccatagccacctgctgtcggaagatcatctcccggcttaattacaaacgggaatacccaattcttaatctcgttttcgaattgctcaatttttacaacttttctttttggtaaaaacttcccatttgtcctttcaggtattcttgctttattatttaaagcaacaaataacgttttatctaatgcataatattgctgattcaagattgtttcatcatgaatatattgaaaataaatctttttattttccttatgtgccaattgtttgatcaagttttcgtaagattgctgattgttaaatgtataaattgaattcggtacatccttaccaataacttgaaatagctgatgcaatttgtctgtcgcactagcttcgtgaacaataacaggtaattgatttgctattaataactccctaccagttaaaaaattagattgatgttcgtccggtttcaaccatggattcgatatatacgaaggtcttgacgtatagacaacatctttgtcatataaatcacttaacgttaagttcggctcattaccattatttgtcattacttcccattccctttcaaatgcgcatgctcttcaataatgtcttgataaacgtcttgatttgtaattaactctaaccccatcaacgccattattttagcacctttaattaatgcttcatcaccatgtacactcgcagctgcttctctaaatctatgcgtatgtactactaaattacgtgatcctattttaatatgaggatgtattgttggcacaacatgacttacgttccctgtatccgtagagccataaccaaaatcatcatcaataactgcttcaccaacttcttcagcatatttagcaaataaatcatctaatttcggcgttttaatgaattcattcacaccgttttgaattggaccaaattcataatcacaaccagtctgtatcgcagctccacgtgcgatttgatttactttttctgttaatatatccaattctttacgcgtcattgctctagtataaaaacgagcatgtgtatagtctggaataatattagctgctttcccgccatctaaaatcacaccatgcacacgttgaccttttttaatatgttgtcgtagttgtgctacaccattaaaataactaatcatagcgtctaatgcatttaacgcttcatctgcattttcagaggcatgagcactttttccgtaaaatttaacatctaaaacatccactgccaaagtatcaatcgttttataagtttcatttcccggatgaatcattaaggcaatgtctatttgatcaatcacaccagccttgacataagaagctttagcgctaccattttccccaccttcttcagctggacatccgagaacgattactttaccaccaatttggtcaatcacttgcttcaaaccaattgcaccaagcacacttgcagttccaatgatattatgaccacaagcatgacctaatcctggcaatgcatcgtattctgctaaaaaacctatagctggcccgtcaagacccgaatcatatgtcgctataaacccagttgcatgcccagcaatctcggtttcaatttcaaaatcatgttctttcaaacgatctattaaagttcgagacgcaaatatttcttcattaccaagttcaggacgttcatgaattctatgactgatttcgatataactatatttatttgtttctatataatcgagaatttgttgtttttcactcattttttctatctcccttttaccctacactcattttaatcatccacaatattttgttctttcaaaatgaattattacttattctatcggttttatctcatgatgtcatctaatttttctttatttacaaaattttctaataactaaaagcctttcataaatttataaaacagtttcaaattgtaaaacataatccctattgttacaatttaagtattgttagaaacgcaacttgcaacaaatttaagtttaataatgtaccaaatcattcgcgttttatagttttgagtagttaataggaggaaatttaaaatgacaaaaatgaatgttgaaagtttcaatttagatcatactaaagtggttgccccatttattagattagcgggaacgatggaaggattaaacggagatgtcattcacaaatatgacattcgtttcaaacaaccaaacaaagaacatatggatatgcctggattgcattcattagaacatttaatggctgaaaatattagaaatcatagtgacaaagtcgttgatttaagtcctatgggttgccaaactggtttctatgtatcatttattaatcatgataattatgatgatgtattaaatattgttgaagcaactttaaatgatgtgctaaatgctactgaagtgcctgcttgtaatgaagtacaatgtggctgggcagcaagtcattcattagaaggtgctaaaactatcgctcaagcatttctagacaaacgaaacgaatggcatgatgttttcggtacaggaaaataaagcttagtcaatcaagttaatcagaaaagcagtcgaacaatgatgttacaatcgccattgtccaactgctttttattatgcttcaaaatcaaaaaatcgaacaaatgaaaaagtaaaatctttaacatttgtccgatttatttaagaaccactataatttcttaattagtcccattaacacgaactgcataggtaaccttaaatatagttgccatgttggcaattgtttatctcctaaaggtaactttttaactgccatatagatattagccgggaatacagctagcaagaatagattgattgtatttttcaagcattgagatggtcttttaattaaaagtgcaagtccaaataatatctcaaagattcctgtaacaagaaccgctgtttttcgaagcggcaaacatttcggtatgatatttctaaattgtcgttctcgtgtaaaatgcaatacacctattacactaaaacctatacctaataaatatcttagtatgttcaatcagcttcaactcctactctgtaattattttatgaattaatgtaggcgatacaacatgatcagcaattgttatgcttgaatctaattttttaacaacatcgtctacatcttggcgattactgtgaatcgttaataatgattctccttcttctactttatccccaatttttttatttaaaacaataccaaccgctaaatcaatatcatcctcttttgttaaacgtcccgctcctaacatcatcgaagcgacacctatatcgttagagactaactcagtcacataacctgattttttagctttatattcgatttgatattgagcttgtggcaaacgctctggatggtcaataactgtttcgtctccaccttggtttttaataaatgttttgaatttttctaatgctgcacctgaatcaattgccttaattagcaaagctctcgcttcttcaagcgtttcagctttgtttgcaagtacaaccatttgagaacctaatgttaatacaagttctgttaaatctttcggaccttgtcctttcaacgtatcaattgcttcttgtaactcaagcgcattgccaatcgcacgaccaagtggctgattcatatcagaaataatcgccatcgtattacgtcccacattattaccaatacgtaccattgcgtgcgctaatgcttcagcatcttctaatgttttcataaatgcaccgctaccagtttttacatctaatacaattgcatctgcaccagcagcaatctttttactcataattgaagaggcaattaatggtattgaattgacagtaccagtaacatcccttaaggcatataattttttatctgcaggagttaaatttcctgattgtcctacaactgccactttattttcattaaccaatttcacaaatgttgcttcatctatttcaacatgaaaaccatcaattgcttctaatttatcaatcgtaccacctgtatgacctaatccacgaccactcatttttgcaacaggaacatctacagctgctactaatggtgctaaaaccaatgtagttgtatctcctacaccacctgttgagtgcttatccactttgacaccattaatatcactcaaatctatcatatcaccagaattaaccatagccatcgttaatgctgcacgctcatcatcattcatatcttggaaataaatcgccattgctaaacttgatgcctggtaatcaggaatatcccctttaacatagccgtcaataaagaaattaatttcttccgttgttagtgtatgaccgtcacgctttttctcaataatgtctatcattctcatttttatcatccttttcttaaaaagcttaggacaaagcatctgcgctttctctagtccatttttaaaagcacaagcgaaaattattatagcaagctatcgatttcatttttaatatcacaatttcaatgcgatgttattattcttaaatagattggttataacgtcaaagtccctattaaattatcttagaatcatcatggcatttatgatgtcttaaagctgatatcgacatacttatatatggttacgatgtcccatgcttacatattttttataaaattagtaatctgaatctgcttctaaaccttgcataatttgaacgcctgcgctcgcaccaatacgtgtcgcacctgcttcaaccattttattgaaatcttctaaattacgtacgccacctgatgcttttacttctacatctgcacctactgtatctttcattaatttaacgtcttctgcagtcgcaccgccacctgcaaaacctgttgaagttttaacgaagtccgcaccagccgcttttgttaattcactcgcttttacgatttcgtcatggttcaacaataccgtctcaataatcacttttactgtgtgacctttcgcagctttaaccactgcttcaatgtcttgttgtacatcatcaaaacgtccatcttttaatgcgccgatgttgatgaccatgtcaatttcatctgcaccattttgaattgcatcttctgtttcaaatgctttcgttgccgttgtcgacgctcctaatgggaatcctattaccgtacaaactagcacctctgaatcagctagtcgctctgctgcatatttaacatgcgttggattcacacatacagatttaaaattgtacgctttcgcttcatcgatgatttgatcgatttgcgtacgtgttgactcaggcttcagtaaagtgtgatcaatcaattttgcactattcattttctatctcctcctttatgattgattataaaaatacggttgtaaattagttgattgagcgtcaggttcatttaaatatcaggttagatgtccgcttttatgtaaccgcatacatatactattacattaattcatttcccataaacaaacaatacaattgaacatgatatcttcattatgaacgatgacttgccaacaagctaatcaggattatatttttataattctttaattctatagtacaaaaattcgcaaaaaagggaaacaaatgttatcttaaaattattaatgaatattaaggagaagataacaaatgacaaaaggtacaccacatattcaaccaaatggagtaaaaattgctaaaacagtattaatgcccggcgatccgctacgcgcaaaatatattgctgataattttttagaaaatgttgaacaatttaacgatgtacgtaacatgtttggttacactggtacatataaaggtaaagaagtttctgtaatgggttctggtatgggtattccaagtattggtatttactcatatgagttatacaacttctttgatgtagatacaatcattcgtatcggttcttgtggcgcattacaagaaaatgttaacttatacgatgttattattgcacaagctgcatcaactaattcaaattatgtagatcaatacaatattccaggtcatttcgcgcctatcgctgacttcgagttagtaactaaagctaaaaatgtcgctgaccaaatcggtgctactacacacgtaggtaacgtattatcttctgatacattttacaatgccgatccaacattcaatgatgcttggaaaaaaatgggtattttaggtatcgaaatggaatctgctggtttatatttaaatgcgattcatgctggtaaaaaagcacttggtattttcacagtaagtgatcatattttacgtgacgaagctactacacctgaagaacgtcaaaattcatttacacaaatgatggaaatcgctttagaaatcgcagagtaacttatttaaattgactttaattgctctttaacaatgcgattaaactcaaaaagccaacacattctgggcgtatccccatttatgtgttggcttttatttatattattacttatctgtatattagcttaagtaagatttaaacatccaattatgtttatctactgatgtttgcatacctataaacatatcttctgatacatcatcgccagcattaccagcaatttcaatcgctttttctaattgttttgagatattagtgaaatcttgagataattcttcaaccatttgttctgcagagtaacctttcgcagcttctttaacaattgattgctctaagcattcagttaatgtacctacagggtttcctcctaccgctaaaattctttcagctaattcgtctacatattgacttgcttcattatataattcttcaaatttaacgtgtaatgagaagaagttaggtcctttcacataccagtggaaattatgtagctttgtataagctactgtccagtttgctacttgttgattcaattcttttacaacatcttgttgattactcatatttaatacactccttaaaattgtctacgtcttacttgtttatattaattattatattataatgattctaatctgtaaagtgtttttactctcttttttataattattctaatctgattgcaaagtgtttcgcttttcaaatgcctaaattttaatccatcatctagtatatctattatcaattagcaactatgttttatcaatcagtaagttttactttcgcattatcatctaaaaagaacgatttttcataatcatttggttggtgccatgttgttttccacattctatttctattattagcaaacattcgataaccgaaattacggactggtttaggtacaagccataaacctacgcccaataatttagttcgattaggtagtgctgtgattagttgaataatcgcctgcgattcaaaatatatacgatcacctttctgtaaaatcacactatttttatttgccgcttctggatgttgtttaaaaaattgttgtccaacttcaccttttaacgtggcaaattgataatttcttggtaggtcatgttgaattaaccaaatgacatagttataacaatatatacagtttccgtcataatatacgattggcataatttattcgctccttcaatagtacttatagtcatttttcctaatttaaaaacatttaaacaaggttgtcacttgataagtcctcacgacacgaaattgccataaagtttatttttcagttttatatttattgtataatgtattttttatttactttaaatttctcaatctacagtgtaatattatttcttattatcaacttagcgtttggtcattcgtcttattcaacataccactggaaaactcatataaagttttaattcagtaacataaattcatttatattcatatactgtctttattatttattaaaataaaaacgagtaatctatcataagctcttaattagctcttatggttgattacccgtcattttttctttatacggttattcaaatatgcaattatgcaatttttaatctaatccttacttcttttcaaaaactaccatatatcattagtcatgtttgactttgactatacgtgtgtattttaaaaattgctctgaatatttctccttaatttcctctaaactgtcatatgtaataccaacaatatgccaattaggattgaaataatagaaagaatctttttgtcgtgaccatttaatcatattaccgtctttattataacgtggtaatgttacttcatagccttctaacacattaatatacgtttggaaaatgtctgtatctatacgattaaaattatcaataactaaataacttttatcctttttaggcattaattgagtaataaatccttcacgatagtataatgcccctgtttcatttggtaaatacttgccataaagcatatcttctgaaaaatcaggatgtcctgttgttataacaggatttgcattcgctttttgcaataagtcattagccgcttttaagccttcttcttttcgatctacaacaagtaaaataaatggctttaacgcttcttctttttcactttcaagcatatctggtttttgaaccatttcaaatggagatttcaatccattattatcgctcatttcaataattgcatcatactgtgcttgtgacatacttgcaatagcctgttttgcattttcttgaaggaaatataagtttttcaatttaggatgcttatttaatgtacttaatgtaattggcgtaatatctttctcataagacacttcaatcactgtactatttgttctaccaggaattggtggtttttcatgaatatgctttgatacttctccaattccaacgacagattgatttttcgttcgattataaaaaataatattgtcgccttcttctaactgagtataaaaatgataaccattacgtttaataccgttgtaagtgtgcgtataaatcgtatattggtttccaggttcaaattcttcagtttcagctaaaaagaaataacgtggtatcttaatttcgcctttaccaagaccacttattaaatcaaactcttctgcagtgatttggttgaacaatgtctctttcatattactcatacgaaattccaaagcttcactacgctttaaataatctgctgttaatggtttcaattgttcattaaaacgaaactgtacacgtattttattttgtgcacctgtttcaacactaataatttcaccacatccaagtagtccagtatcagtctgaacttgataaaagatgacttgatctcctactttagcctttttaaacgctctaaatccttgagatgggttaaaatgtgcgcctgattcaaataaagctgtttgtcctactaacggttcattatgattccaacggttatatccacaattcaaccaaaaataattcgtttctgctgtcatcttaatactccttaacctgaataaattttagaaacactatgaattacattcttttagtgtttcttatgcagttgggcacgtatgcgatcaactgtatcccctttgttcactgcgattttaatcgcatttcctataacattgtagcgcctaggacattaatttacgtcccagactcttatcattttcacttctaagtaagtcgaactattttgctttacaacaagtgcgactctatatactgtcggacacacacataagagcaactgtataccttttaatcagttttctatattttatttattatatctgtcttaatgataaaaattgttacaaacagtttaacatatttagctacctattttgcacataaaaaacatgcttgcatacactatgcaataaaaattacaaatttatatataataccactatgcttgcttatctctatagcgccattgatacacattttcaactatctatactgccgttagaattttatcatgtcttaattttcattaaatattaattacttcattttatataaaccaacaaaaaccccctcactactatgcaagtgagaggttatgttgatgtgctttattttcatcaatgtcattaacacaatcatatttcttctgttaatgcaccgtattatattcaaacgcgctatcgacaattaatttgaagctacaaaggtaccgcataatggcagcacattaattaacaatgcgctaaactttaatgaggcgctgatttgcttgtctttaaaagtcaacatagcactgataattcctaaaatagccactatacgtggaattgtcatgctcggatactgcggtatatgtaagaaagcaccaagacctgctatcacaccacatactaacgcaatatatagaaattgcttcaaatcattcactcctaaattgttattacactattacacatagctaatcatcaatgtgaaatcaccttcaaagacactatccaaatcttcagaagtcaaaataaagtttgtaccagtagtcagtttgaaaatttcaccatcgacaatcatttgcccttcaccttccaacactgtaactaaacagaactctctaggcttcatataatttaacgtgccagaaatttcccatttaaccaatgtaaagaaatcattcgatacaatgtgtgtacacttatggttttcgataatttcactttcaggcaaaatattaggtaatggtgcattgtactgaataacgtctaaagctttttcaatatttaacggtctatcattatattgattatcttgacgattgaaatcataaagtctatatgtaatgtctgacgattgcatcgtttcgtatgctaatattcctgaagaaatagtatgtactgttcctgctggaataaaatagaattctccaggttttactttaatatatctaagtatggactctatcgttccgtgttgaacatgattcgcaacttcttctctagactctgctaatgtccctataactatttctgcatcttcttctgcatctataatataccaacattcagatttgccatattgcccattttcatgctcataagcataagaattatcagggtgcacatgaatagaaagtgattctcttgcatccactattttagttagaagcggaaaatctttgcttgggaaatcaccaaacaattcacgatgttctgaccaaatacggtctaatgtttgaccttgatatggtccattaataatctcgctcgtaccatttggatgtgctgacacacaccaacattccccagttgtatcattgtctaattgatatccaaactcacttagacgttgaccgccccataattttgtttttaaaattggttgtaaaaataatggcattgttgcacctccattgtgattaagtaagcaatagaactctgatgttgttgttccattatattttgattttgttctcatttacatcgtattataaacttccacatttcaaattaactattagtgattgtaccatatttactaacattgcagtactgccaattaaagcgcttcacttaaatttacagtactttaacattttaaaaatttatagcatagagattatatctctcttacatttgtacatatttccctttaaatttactcgcccattataccaattaataaacaactttaatagttgtgccatacattgttcaaattctttgtaaaacgcatagacaatacgtacttattcatacttataattcatcattttcaaaaaaataacgagttacgaaaaagtaacccgcttcaaatcatatctactatccttattaatccttttcaatttcaaattgagttaaagcatctttaatgtcctgctcaccactaataatttgaaactcttggtgattaaaatgattggatgtgacaatttcttttaatactgtcgcaacatcttctctaggaatttcacctttaccttcaaaatattgtgcagcttctatctttccagatcctgctgcatttgtaagtgcccctggatgtaaaattgtataatttaaacctgaacgtcttaaatagtcatcagcgtaatgtttagcaattgtatatggctttaaatcaccgctatcatcaaaagcctgacgtctcgaatcatatgttgaaaccataacatagtgtttaatattagcctctttactcgcaatcattgatttaacagcaccatctaaatcgacaataattgttttatctgcacctgtgttccctccagaacctactgaaaagataactttatcgaatggtttaaacgtctcagttaaagtctctattgaatcattttcaacatcaacaagaattgctttcataccttgtgattttaacgcattaagttgatcggattgcctaacacctgcagtaaatggtacattttcttttgctaattgttgcactagtaacgaacctacaccgccattagcacctataaccaaaatattcatttacaacactctcctatttattattccctatgccataccactttatgagatatgtaaaacttgttataactataaaaatcaattgacatactactgggaacgtattaaattaatatatgaataaatattcatatgaaaggattgtcatataatgtcagaacaatattcagaaataaatacagatacattagaacgcgtaactgaaattttcaaggcattaggcgattacaatcgaatacgtatcatggaattgttatcagtcagtgaagcaagtgttggtcacatttcacatcaattgaatttatctcaatcaaatgtctcgcaccaattaaaattacttaaaagtgtgcatcttgtgaaagcaaaacgacaaggccaatcaatgatttattcattagatgacatccacgtagcaactatgttaaagcaagccatacatcacgcgaatcatcctaaagaaagtgggttataatatgtctcattcacatcatcatcatgaccatatgcatagtcatgtaactacaaataataagaaagtattgtttatatcgtttttaataatcggtctatacatgtttatcgaaatcatcggtggtctccttgctaacagcttggcattactatctgacggtatccatatgtttagcgacacattctcattaggtgttgctttaatcgcatttatatatgctgaaaagaacgccacagctacgaaaacatttggttataaacgtttcgaagtactcgcagcattatttaatggtgtaacgctttttgtaataagtattttgattgtttttgaagcgattaaacgtttctttgttccttctgaagttcaatcaaaagaaatgttaatcattagcattattggtttaattgtcaatatcgttgttgcattctttatgtttaaaggcggcgacacttcacacaatttaaatatgcgcggtgcttttctacatgttatcggagacttattaggttcagttggcgccattactgcagctattttaatttgggcatttggatggacaatcgccgatcctatcgcaagtatattagtttccgttattattttaaaaagtgcttggggtatcacaaaatcttcaattaacattttaatggaaggcacaccaagtgatgttgatatagatgaagttataactactattaaaaaggattcacgaatacaaagtgtacatgattgccatgtttggacaatttcaaatgatatgaatgcattaagttgtcatgttgttgtagaccatacattgacaatgaaagaatgtgaattattattagaaaacattgagcatgatttattacatttaaatatccaccatatgactattcaattagaaacgcctaatcacaaacatgatgaatcgattatatgttcaggaacacatagtcattcacataaccatcaagctcatcatcacgcgcatgtacattaataattttaacctactgccattgcatcgattaaacttttcaatggcagtaggttttttatgtctttatggcgacttgtttggtctttgatgatgcaatgtttattaacaaattttcaactattatttcttacattagtcatatttttgacaatttactattataattctctaactttagtcactttaattaatttttattagatattaatatgaaaataacgtgttttttgttattgtatttatatgaagaaaaggaggcaccactttgtttacttactttaaatcagcattaaaaaatgctaaaccacaattattaataacattgatatatgcacttatagcatttgctgtaattgcagttgtatatttacttgctaatttccagcttgctaagtatgtacaaaatattgcaatttattcacaatttgggcaaaaaccaccaggagatgaatatttaaaagttatcgctgtattacttatagcagctatagtttcactgttcgttttagttcaaatttttatcggaattacaaatgttatgaaacgagcaatgagtcatgaaaaagtaaaatttaccgatttatttattgcatttaaaaaaggtatttatttaaagagcgttctgatcggtcttgtatctatagcaatgattatcgttctttcacttctgacatcattactatacaaattattttctccagtatcagaaatgattatgaattcagtacaatcatcttatgcagatagtacacacctgattggtattgctattacaactcaaagcatcataatcattgttgttttattgattaaagcaattattacttggttattgttaatacctattttcaactttatgactagtttcgttgaatcaactaacgataaagtaaaaacacacttagctaatggatttaaagcaatgaaaaatggccaaaaaacatttttcaaatttttcattggaatactattattaaacttaattattattttatttaaaacacctgttggttacttgatttcatttaatacgcaatcactttctcaaagtgttgcagaaaatatcataagagtttatacagtaatgacaatcattttattcgttgttattcatgcaatcattttaatgggtatcgttcaatattacttaaaacgtggtcaaaaaattactaaagataaagtaaaaacagctgacaaggataaaaaagttgtcactgaaccaaaaaatacaaaagtagaaaacgataaagtgacaacatctgttgaaacaaaaacagaaaaagcacaagattcattaaatgataatacaacaaaaacaatgacttcagataaaccagaagacaatcaaccaaaataaattttagagccccttacaactttagttgttaggggctcttatgcatgcgcttagcgcaggcgctcctacttttacaactttagttgttaggggctcttatgcagttgatgcatagcatccaactgtgttcctctatttttcaactttagtagctgataccgaaataacatgatgctaatttcatgttatctcgaaaatctatatatgaagaggcatccaatgctttttatatagtccgtgattacattctatactttttattgttttttgttgtattgatagttggctttattatttctgattatgttcagaactacaattcataagaaaaatgtgttaaaatatatttgtagtaagtagaagcaaaagatgaaaatctttaactcttgaaacacaaaaagggcaacactcggaaacatgttaccctaatgagcccgttaaaaagacggtgaccttatattttatttaaaaatagccttcaaaaatgccggtcaaagcgaatagaaggttattttttatggtcttgagtactaatcaatactaaaccaatgattgttaatacaaccatcagcatttcaaaatcagacatgctagtcctttctaggagtaacaactataaccataggcatcacccctttattaagagattagccaccatctatccaacttgctcaataaatattataacatgcacacttttaaacagtaattcatagtataagttttttcatttcttaatcaactcgataaacagttgagtgacatacccttgtctaactagctatttcttcccctgttatcgtttgttcatcatataaaaatttaatttctcattttttattctctggtaaagaggggcgcccgctttttcggcctctcgctcttgttgctgctaagtctattttatacactcacatagtaaattaacttctaatcctgaaaaatgcactcatcatcgtaaaaaacattttgcccattgtgtctttcgttgaaatgttcatgttactaatttgtaagtcaattccgttatcatcgaatcattgcgataattcaattaattgctttatcgttctagctaaccgatcaagttgatagacaactaatgtgtcgctctctcgtaaataatctaaacacttaacaagctctgtacgtttgacaccacttattctttcactatatacacacccacacccaaattctttaagtgtatcgatattaatctttcgttgatacacgatcataaccaattttagccatttaaataaaacctctcttcaacatattatatttagttatgactcaaaactcattgccgtatttttgattttgtattaatatatcaaggctatcatcatctaatatcaaatgaatttctccacttcgactatcaatagcaacgtttatttttgattctaactttttcaaataatctatgtcagtaattatgtacttagaaagatattcatcttctttatcaattgtatatccgttctccaacatttttgataactctaaaagcgtattgctccaaccttctttttttacatatgacactacatagtttatgaacttttcaatcaattgttcttccaaatcactataatcttgtgtatcctttttaaataattcaaatataatattattagataaatttttattatatattaatcgctcgtacatatcagaagcgctagagttgataaatctattcagatcattttgtatttcgttcaaatctatattccctttactatcgtaatatgaataattactcattaatttttttaagaaatctctcaaaccaaagtaaagataaacatttgaatactttctggcattatcgtagtcttttacatctcttttatagtgatctatcaacatattcaattcgaaattatatccatgattaaaatcaaaatcgccattgtcatattttctttgaaattcaaacttgtatatttctgcaactttatcatcgcaattttcatctatatagttttcaaccaaataataagcacgctcaagagaaatttcaccataactttggataaaagaggttaagtactctgttttctttaaaatttcttctcctttcttagttggtatatatacatatggtaaatctaagttatcaataatatgataattatcgtcaatacgtttaattaattcaggtttattacctgttgtttttataccaaaactttttaaaatactttgtaattcaggtcttgtctttttgtatatactaacttcaaaatcattagtcgttgataataacttagcttcaattaattttttattgaatttataatttcaaaatcattattagcaagacatttattagcaaatatctcttctccaaccaatctatttacattagtgtgtaatactaataaatcacgtgcatttacgctcactagctttcatctcctcatttttgcttttcaaatttattaagtatgaataaaaaacatccgatcaaacaaaatctctatattctaattagatttatatagattatacactttaaaattgattctcaatgcaaatgaatgtgtctctcatagtctaaaaactcgtatgtttcaaattttatgattcattgataatagtaccagttaaaagaattaagatcgtaattatccctcttaaaattcaagaatatattttcttaatctatcagcaagaggttatatgtcaaagtgttttttaataacatataaaacgctttttcataataatgttaaatcattagaatgtataatgattacaattaataaaaatagataaaatgaaataatgttccaaatacttattattatttatcacaaattacgtgatgccctctacaacactatatcaagaatgatatttattttatatactgtttccttacccacattattctgtttagtcatatttaaaacactagtcttgaatgttatatttacaaaaaacactaaaacatttaaaaataacactatttatttactttgttcttttatagcgtcgtttatgtttattttcttgaattcagaaaatagtatggatatgataatttaatgtatatatatttgaagtatactttggtgtaaattggattgacgaaattggtaaaagaactggttgattatatagtggagttacacttcatgaaaaaaacaagaactaaaacagtcaataggtgtggatgttttcaaagatggctctgttgctactaaaaaaagaagcctacaattcaagagttagaccttaaaacaagaaatattattcaagatcaatgaatttcctaccttattagttttaacaatatttattctcatagagtttatacaattaaatgtagacgattcaaatacttataatcatacaaaagagcagtaagaaatttataaattcttactgctcttttgtatattgctcatcaactattttgaattaattattaaagcaccaattaatcagctaaaaaatgttttgctaaatattttgctgcgccatcctcttcattcgtatatgccgttacatctgaagttaatgcttgtatttcaggacgtgcatttttcattgcgactgtgtaatgtccaaattcaaacattgctctatcattatcactatcaccaatgactaacgtttcttcttgattgatgccaaaatgttcaatcatttctttaatgcctgtacctttatcagtttgataagccattgtttccgcattaaatcttgatgaatttgaaacactaatctgtagttgcacatgattttgctttaattcatctctaaatgctgttattttttctaaattagaactgaatagataaatttttgaatattcaccttcaggaaacttagttacccaatctatcttaccagcaagcgcatcttgtcttgaagaccattcactatgacttacgccattaataggatcttgactacaaatcatatctcgcatccatgtttcatcttcttttaaagaaactctattaccttcaaaaggaaatacctcataataaatttgttggcgcttagctaaattaataatttgttgcacttgagccaatgataaaccatgtttgaagataatttctccatctacttctccaatggttccatttgaactaatgatgccatttaccgcaaaatcttgtggtacaagttgatgtatttcagaatgcgaacgtcctgttgccaaaaatactttatatcctttctctctcaatcgattaatgacatctttcgtatacgttgatgcttgattattttcatgtaaaattgtaccatccatgtccaaaaatattgcttttacgttatccatattgccctccactgtcaattttagcttaattaaattttgtcattattagttagtatttgcaaaatatttactctaacatcgccatagaaaatcgattattccatctttgaactgctacttttttccggaagaaataagacatgttttcagaagttaatatgtcttctacagcgccttgttgaatactttggccatcttttagcagtaaaattttggaaaagttagcagttatttcttcaataaagtgcgtaacataaatcatcgcaagtgttggatacgtatctgacagggagtctaatatattcaatagtgactcacgagcaataaaatctaatccagctgctggttcatctaaaattaaaatacgcggttgccccatcaatgctctagcaatcattacacgttgtttttcacctgtggataaatatcctataaattgttgagctttatcagacatttccactaattttaataattgatgtgcttcacttattatgtcatcatctacatttttatatagacctatagatttaaaagcaccactcattacaacatctattaccgtttcaccctcttgaaatttctccaataagctatgtgatacaaatcctatttgttgacgtacattttctgcagaataacctaatttacctggcattttaccgaacagattaacagttccagatgtcgcaggctcatacgcatttaaaatatttagaagtgttgtcttccctgctccgttcaaaccatataatacccacttatcaccttcatcaatttgccaagaaacatcttgtaatataggcttaccttgtttaagacgcccaacatgattcaatgtgattaacatatgcacccctccattttaatgtaatattcgatactttaaaattatcgtagcatattacaactaattgtcagactattataacaaattaaagtatgtagcatatcctttttgatataaatcaagattaccattttaagattaaataaaaacacccctttagacttatcattgttggtttgaaataaagtttgatcaagaatatgctacaaacgttgattttataatagaagaaccccacgtattttgaacaaagattgatcaaaatacgtgggggttcgttttggtttggtgtgaagttttataaaaaagattgattaaaacctttcgtaatctcgttttccaatataaggtattaactagttagtccaccatctatatttcgaaaaagctatcgacatcgcaatttaagtattcaaaagtcaatagttaaatgatacttactactacatttatcacttaatagctcttaaaaagagtactataatatattatccaaaccactcttttcaattaaaggaacacctgcatccattaatgtttgtatcagctcagaaatatttttagtctcttgcaatatatttttctcctcaccaaactttaaaatgtttcttttttcacttatagtaaatattattttttgtttcgctctagataacgctacaaaaaatgcatttttatctgcctctttttgagtagaaaaactccaaaacgcatcatcttcaactccaataaaaaacacagtatgatattctagtcccttgcttttatgaattgtcataataggtatactatattctccacaaaactcttgtactagccccctcattgaaatacaattttgatattgtagtttatctatcattttttgcattacttcattgaaataattagcttggttatatttcggataagtagcttttatgatatcttctcctaaaaaaactacaatttcttgtaatatttctgcgaattgtgtattgaagtttgtatcattaatatttgaatagagttttctaacctcatctaacatttttaccaattctttttctatgattaaatagtttatactttcagaatcagcatcactgtacttcatatctatgatttcatcaatgacatttagccataattcaggggatttttcttcataacttaattttaaaaacctaataataagcaaaactaattcctcagataataggtcttgataatctttttctattctactttttatattaattttggaaagttccttcattatttcagctgcatagatatgttcgtgttgtttaacgatgatacaaaaatctctaggctttagattttctactttcatccatttacttatataagacgctaataggattgcttcgatattatgatttttaaaattccatatttcacaaaccccttcatttttgttccactctccagctgggagaacttctatggaggcatcattaagagttttagaaaagatattttgtatataaactaaattaggagcagatctgaaattattcaaaagtgtatactgagttgcattaaaatcagttttaaatattccaaatgcattctgtaaagctccagcccagcccataatacgctgtttattatctccaacagcagtaataacagtatttgatttcaaaaaaattgttttcagaaggttgtattgaatgtgtgttgtatcttgaaattcatccaaaaaaacatgactatatgtcgcttgtaatgccttaactagtaatggattttcttttaataaatactcaactaaaattgatatcattgaaaaagttagtgaactttttaaatttcccttaccattcaataaagccatccacagtctttcgtttatccaagagtataaatcatcttcaaaactaactattggtaactttgtttctttcatggttctcaacacactattaatatgatattcatattgccaattagaataataagagtaaggctctgtaatataagcatttataatatcgtttagtgatttttcgtttaaaataatctcataatttttttgggctgatactctttaggtaatgcgtgtataaattgatccaatattcccttagcaaaggcatcaaaggttttcgattcaaaccttttttctacacctttaccgtatctcaattcaacacgttcttgcagatttctagcagcatccgttttaaagctaatagctaatatttttttgggatatggacacattccagtttcgataaggtatccagctttatgtgctaacaattctgttttaccagcacctggtccagcggcaatcgctacatgacttgaagctcttatagcatgtaaggctgaatcttctagtgttacatcgtctgaaggcttccattcatgctctaatatcctattattcatctatgttacttcctcctactaacccaactttttcttttacacgttgtataagtcgcaagagttctttaggagcattttctattatttcattctcatcaatatcttttagagccgctatatgcgtacttggtttccctctacctaaaaataaggagttataccaaatcatcagctttttttcatcttccgaatatgtctttgcaatagctttctcattttttaaagttgcttgtatagatttttttaatttttcatcatattctgtcgaatttgaatcttttggaatttgaggccctctttccatagtgttctgatattcttcttgaaaactcattaacatagtgaaatcaagatcgagaggatatgaaaagaaaacatcttctttttctaatttttctatccaagtattaagtgaatttaatctattactttttctattatgaaagtcttctatctcttccatactataagtatgatatgtgttacttggaattaatagaactgtacgaagttgttctgaacatctattattctcatcaagttgttttaacacatacttaattcttccccaatcgcctccacctcgttctctatctaaatctaataaagtaacgtgtggtattgataaatcatttaaaagcttccacatatgatttacatatcttcctcctaaaggaactactgaaatattgaaatcatctaaatatatattgtctgcgctcagtagtttgggtaatactatttcttcactatctccttcacctaaaatcactaatttcgaaaaatataaatctggatatgcttttacagcttctttgatataggtatgagcatcatcatttttttcagggagggtaatattatttacaattgattctgagttctgtatttgtaaatgtctaatatactctggatctacttttccaattatagatgaattgtgtgatgataaaataacttgagcattatctttcttggatatttcttttaagtttctaactattcttcctaacaaatgctgtgaaatatggttttcaggttcctcaatagctaggatgtttaacaaaggtttatcatctttttcttgtttattttctatttcaagtagagttgatactaaagttatataaaataaagattttaaaccatcacctaaactatccacttttacggaatttccatcaatagtaggattaaataaaatttccgcatttttcaaaaattcctgcaaactattaccattaaatttaaattgactattagaatatcttttatctttatgatatttattccattgattatttaaaattccctgaatatcttttatgctaggaatctctttaaataacgtttcaataggagacgttaaagattttatatagtcatttaaattttctggccagtcaataccatcaaatatacgccataataaagtaccagaagcattttttaattgctttgctggatctctcattgcaggtatatacatcatttgaattaatttttgatgatgaattggtactctagttaaatcttcttctttttcttcacgaccatagggaatttttacataaactaattcttgttctatattaccttcaggagttgaaccttgtatccacttcccctttaatctaattcgtaaataaggatcagcatctgtttcttcaataattaaatgtttaatgaattctggaacagtttttatattagcaggtgactctaattttaattctggaaatattaccttcgcttctatcataagatctatttcattaattttagatatatcagcgctctctggaatatgaaagtctgtttttattaaagttctatctgtatttttttgtccaaacaatcttaataaagccatgattaaacttgttttaccagaactattagcaccaatgagcgctgttaaatctgcaatttcgatcatttgtgactcatttccaaacgatctaaaattacttatatgaagttcagaaattaacataaaaacacccctttagattactataatctaaaggggtaaaacggtgcaactttttataaacggtataactttatttaaaacggtacatcttttttatcaacggtacgactttatttcaaacctacaacatgcactgataaaatatgcgtaattattccacagtaactgatttagctaggttacgtggtttatccacatctaaatctctgtgtaatgctgcatagtatgaaattaattgtaatgcaacaactgatactaatggcgttaacaattcatgtacatgaggaatgacataagtgtcgccttctttttcaagaccctccatagaaataatacatgggtgtgctccacgtgctactacctctttaacattaccacgaattgataaattaactttctcttgtgttgctaaacctacaactggtgtaccttcttcgattaaggcaattgtaccgtgtttaagttcgccacctgcaaaaccttcagcttgaatgtaagagatttctttaagttttaacgcaccttctaaacttacgttatagtcaatagtacgtccgataaagaatgcattgcgtgttgtttctaagaaatctgtagcaatttgttccatgattggtgcatcgtcaacaatcgcttcaattgctgttgttacttttgctaattctctcaataaatcaatatctgcttcacgaccgtgctcttttgcaacgatttgagacaagattgataaaactgcaatttgtgcagtatatgcttttgtagatgcaactgcgatttcaggacccgcgtgtaataacaatgtgtggtctgcttcacgtgataaagttgaacctgcaacattagtgattgttaatgatttatgacctaatttattagtttcaactaatacggcgcggctatctgcagtttcacctgattgagaaatataaacgaacaatggtttttcagataataatggcatgttgtagacaaactctgatgcaacgtgtacttcagttggtacgccagcccatttttctaaaaattctttacctactaaacctgcatggtagcttgtacctgctgcaataacgtaaatgcggtctgcttctttaacatcattgatgatgtcttgatcaattttcaagttaccttctgcatcttgatattcttgaataatacgacgcataactgctggttgttcatgaatttcttttaacatgtagtgtgcataaacacctttttcagcatctgatgcatcaatttcagcaatatatgaatcacgttctacaacgtttccatctgcatctttaataataacttcatcttttttaacaataacgatttcatggtcatggatttctttatattcgcttgtcacttgtaacattgcaagtgcgtctgatgcgataacattgaacccttcaccaacacctaataataatggtgatttatttttagcaacatagattgtgtctttgtcttcagcatctaataaacctaatgcatatgaaccatgtaataatgacacaacttttgtaaatgcttcttcagttgaaagtccttgatttgaaaagtattcaactaattgaacgataacttctgtatctgtttctgaaatgaatgatacaccttgtaagtattcaccttttaactcttcatagttttcaataacaccgttatgaactagagtaaaacggccatttgatgattgatgtggatgagagttttcatgattcggtacaccgtgtgttgcccaacgtgtgtgaccgattccaacaggtccatcaaaatcgctactatcagcaactttacgtaattctgcaatacgacctttttctttaaatacagttgtattatcatcatttactactgcgatacctgcagagtcataacctctgtattctaatttttctaaaccttttaataataattctttggcattatcatagccaatataaccaacaattccacacataacgacattttcctccatattggaatagtacgcgtaaattatgatttattgccgataatttagattgacaatctgctttcataatataaataggaacatgctatcatcgcattcatccataacaaattaagcatagttatttttacaactatacaaattgctcacactgtactttccatattaatattttttatattcaatttctggcgatcttattaactttgtccattaagtcaccctaatgttttacttaataagctaacgaatgagccacatccgggatagcatccgccgatctattcgatcactatcctcctcgtctacaaatacatatattgcactctataaaggccactcatatattaacctttaatcttcaaatacaaatatttatttgcacaggcgctttaactgtactgccgaactttccccctttccattaatcattattgtacaacggtgttgttttgttttgcaaatattttcacaataaaattttaaaaatcctaaaacaatttttttgttttactttttcaaaatatctataccgtcacatttatgacactttatttaattttgtcacatttattttgacaaagttgatttttgtttatattgagtaacaagtaacgtctctatacactatatatagtcacatatattaaaaaagaggtgtaaatatgtcacaaactgaagagaaaaaaggaattggtcgtcgtgttcaagcatttggatcattcttaagtagtatgattatgccaaacattggcgctttcatcgcttggggttttatcgcggccatttttatagataatggatggttacctaacaaagatttagctactttagcaggaccaatgattacttatttaatcccattattgattgcatttagtggtggtcgtttaatttatgatttacgtggtggtatcatcgcagcaacagcaactatgggggtcatcgttgcattacctgatacaccaatgttacttggtgcaatgattatgggtccacttgttggttggttaatgaagaagaccgaccaattgattcaacctagaacgccgcaaggttttgaaatgttatttaataacttttctgctggtattttaggatttatcatgacgattgttggctttaaagtgttagctccaatcatgaaattcatcatgtacattttatctgtagcagttgaaagtttagtacatgcgcatttacttccagtcgtaagtattttagtagaacctgctaaaattttattcttaaataacgcaatcaaccatggtgtatttacaccactaggtacagatcaagcagctaaagtaggacaatcaattttatacacaattgaatctaaccctggaccaggtttaggtatcttacttgcttatatgatttttggaaaaggcactgcaaaagcgacgtcatatggtgctgggattatccacttcttcggtggtatccatgaaatttatttcccatatgtattaatgcgtccattactatttatcgctgttattttaggtggtatgactggcgttgcaacttatcaagctactggatttggttttaaaacacctgcttcacctggttcatttatcgtttattgtttaaatgcaccaagaggcgaattcttgcacatgttgctcggtgtgttccttgctgcacttgtatcattcgttgtagctgctttaattatgaagttcactagagaaccaaagcaggatttagaagctgcgacagctcaaatggaaaatactaaagggaaaaaatcaagcgttgcttctaagttagtatcttctgataaaaatgttaatacagaagaaaatgctagtggtaatgttagtgaaacatcttcattagatgatgatcctgaagcgctattggataattacaatactgaagatgttgatgcacacaattacaataatataaatcatgttatttttgcctgcgatgcgggtatgggttctagtgcaatgggtgcaagcatgttacgtaataaatttaaaaaagcgggcattaatgatattacagttacaaatactgcgattaatcaattgccaaaagatgctcaattagttatcactcagaaaaaactaactgatcgtgctattaaacaaacaccaaatgccatccatatttcagtggataatttccttaattcaccaagatatgaagaacttttaaataatttaaaaaaagatgatcaagcataataattaaataaattaaaaaatggaggataccgccatgttattgagtacacgtgaaaaagaaatgatagccctattgattaagtaccacggtcaatatatcactatacacgacattgctcagcaacttgcggtgtcctctcgtactattcaccgtgaattaaaaggtgttgaagcatatttaacttcattttcattaactttagaacgcgcaaacaaaaaagggctacgtattgctggcgaagattctgatttaaacgatttgaagcaatcgatcgcacaacatcaaaccattgacttatctgttgaagagcagaaagtaattattatatacgctttgatacaagccaaggagccagttaaacaatatagtttagcgcaagaaattggcgtttctgtccagactttagcaaagatgttagatgatttagagctcgatttaaataagtaccaactatctttatctcgaaagcgtggcgaaggtatttacttggtaggtaccgaatcgaagaaacgtgaatttttaagtcaattaatggtgaataacttaaatagtactagcgtttattcagtaattgaaaatcattttgtctttcattcattaaatcaaatccacaaagactttgttgacttagagcgtatttttaatgttgaaagactattaatggactacctaagtgccttaccctaccaacttaccgaatcaagttatttaactttaactgtccatatcgtgctatcaatttcacgtataaaaaatggagagtatgtcgcattaaacgatgatatttatgattctgtacaaaacacatttgaacacaaagtagcgagcgaacttgctgataaacttggtcaaatatatgacgtcacgtttaatcaggcagaaattgctttcattactatccatttacgtggtgctaaacgaaaaaatcttaatgatacatcattaaataatcgttgtgaagaaaacaaaattaaagcgtttgttaaaaaagtagaaatgatttcaggtatgacatttgcagatttggatactttagtagatggactgacgctacaccttaatcctgcaatcaatcgtttgcaagctaatatcgagacctataatccgttaacagacatgattaagttcaaatatccaagactatttgaaaatgtaagattagctttaaatgattgttggcctgatttgatttttccagagagtgaaattgcttttatagttttacactttggtggctcgattaaaaaccaaggtaatcgatttttaaacatattagtcgtttgcagcagtggtatgggaactagccgtctattatcaactcgtctagagcaagtttttagtgagattgagcgtattacacaagcatcagtcagcgatttgaagtcactagatttaagtcaatatgatggcattatttctactgtgaatttagacatcgcctccccctatttaacggtaaacccattattaccagatagtgatatcagttatgtcgcacagtttttaaatacaaaatctacgttctcagagacgcatgataaatcatcaaacatgattgataaggatgatgttcatgttgaaacgaaagatattcatggcaacacatcttttgaaaatgaacaaacttcatacttaacttcagttttagaaaaacatttaagtgacgaaaaatcagaacaattaatgcatcatatgcgttcgggtttaactttgcttgattcagtgaaaatagttagtaccgaagttaaacagtggcaaacatatatcgcagattatctatatcaatgcgatgtaataaacgatccaacgtcattcgctgaactactagagcaacgattgattgacaatccaggatggatattaagtccatatcctgttgcaataccacacctaagagacaatatgattaaacaccctatgattctaattacagttttagaagaaccgttaacattgcctagtattcaaaatgacaatcaaacaattaaatatatgatttccatgtttattcctgacaatgattttatggcatcactggtaagtgacttgtccgaatttttaagtttgaaattagaatctattgatacttttatggaaaatccacaggaacttgaaacattattaagaaacaaatttttagaacgaattaaaaaacaatttatttaggagtgtacaaaatgagcgaattatttagtaatgacaatatctttttaaatgtaaatgttaacagccaaaatgaagcaattgaaaaagcaggtaaagccttagttgatagtggtgctgtaacagatgcttatattcaagcaatgaaagatcgtgagcaagtcgtatcaacatttatgggaaatggcttagcaattcctcatggcacagatgaagctaaaacaaatgtgattcactcaggtttaacattattacaaatccctgaaggcgttgactgggatggcgaagtagttaaagttgtcgtgggaatcgctggtaaagatggggaacatttagacttgttatctaaaattgcaattacatttagcgaagaagaaaatgtggatcgtatcgttcaagcaaaatctgcagaagaaattaaacaagtattcgaggaggcagatgcataatgaaagcagttcactttggtgctggtaacataggtcgtggtttcattggttatattcttgcagacaacaatgttaaagtaacatttgcagatgtaaatgaagaaatcattaatgctttagctcatgatcatcaatacgatgttattttagctgatgagtctaaaacaacgacgcgcgtgaataatgttgatgcaattaattcaatgcaaccttctgaagcgttgaaacaagcaattctagaagctgatattattacaacagctgttggtgttaatatactacctattattgctaaatcttttgcgcctttcttaaaagaaaaaacaaaccatgttaatattgttgcttgtgagaatgctattatggcaactgatacattgaaaaaagcggtacttgatattactggccctcttggtaacaatattcattttgctaactcagcagttgatagaattgtaccattacaaaagaatgaaaatatattagacgttatggttgagccattttacgaatgggttgttgaaaaagatgcatggtatggtccagaactaaatcatattaaatatgttgatgatttaacaccatatattgagcgtaaattattaactgtgaatacaggacatgcatatttagcgtatgctggtaaatttgcaggtaaagctaccgtattagacgctgtaaaagatagttcaattgaagctggcttacgccgtgttttagctgaaacaagtcaatatattactaatgaatttgattttactgaagcggaacaagctggttatgttgaaaaaataatagaccgtttcaacaattcttatttatctgatgaagtaacacgtgtcggacgaggtacgttacgtaaaattggccctaaagatagaattataaaaccattaacatatctttataataaagatttagaacgcactggtttattaaatacagctgcattgttattgaagtatgatgatacagcagaccaagaaactgttgagaaaaataattacattaaagaacacggtttaaaagcgttcttatgcgaatatgctaaagttgacgatggcttagccgatgaaataattgaagcttacaattcactttcataatttattgagctttgtttgaaactataattttccaacgttattcgttaaaaatcagtaataatgtagtagttccgttgaattaacaatattaaatttctgaacataaaaatactcccttcaacatagacacttaacttgtgttatgtatgaaaggagtatttttgcgttaataatttgttttattttcgagccacagccacctattcaatggctattggtcattattaaaacaaattcatattaactgttagacttggttacttagtaaggaatatttccctatgaaataactagatgtccacattcttgaataaattttattcttcagtttgttggtctttcttagtgaatcttctaattaagaatgccatacctgcacctagagctaattcagcatatggtaaatcgtcattatgtgacataccagtatctggtaaagttttagcttgttgtttaggcttattaacttttccttgttgcgctgattttacatttgttttgttttctttagtcttagttacattaagcatatcttgattagcactattgcttccttttgaaactgtagctggagatgcattggcaccgtcgttttgcgtagctttattgtttacatctgcagttgcaccaattgctgcttgattatcttttgtatctgctgttgccatgtcagctttttgactatcctcagtcgaagtcgctttatcttttgcttctgacggtttagatgttgatggtttattcgatacatcagtatcaacgttgccttcagatttatctgcttcgttagatgcaacgttagtttcagacttaagttgtccggcatctgtttgatttgtcgtactttcttctttatcttttgatgtattagaagatgcttttggttctgttatgtctgctgaaggcaatgtttcagttgttgattcaaccatactttgatttgttgaatctctaccatctttttctgccttagctttattttcagattttggttgtgcaaccttgccattagttgattgagattcagcactattatttacttcagcattttgttttgaatcatttacagatgcattatctttgctatcagcagatgatgctgcttctgtgctcgcagttgttggagccgttgctgttgatcctgttggtgcattctcgtttgttgcagttgtactattgttatttgttgtgctttctgctggcgttacattatctgtttctgttgcaggtttatcagttgtgccgttattagttgattctacttctggtttatcagttgtaccattacccgttgccgaattgtctgttgatgcatctacactagaatttttattagctgtcggtttattatttgtatcatcagttgatggattgtttgttgatgttgctgttgttccaccagttgccgcatcattctgattatttgtcgttgttgaagacgtatctgcattggcattatctgttgactcagttacattaggttgtccagtattttctggtgttgcattagcatttgaatttgctgttgcatcattattatctgaaccactattagtatcgttagcatttggatcattctgaggcacaatcgcttcaattgcaggtatcgttacattttgtaattcagcaacttctgtatttgtttgagttttatctaatttatcagcaaatctgtcaaaatatctacctaaatctgtacgtgcaatttctttcgccgatgcatctgcatctgcatttttaattatttctatttgcttgttaaccacttctctaattgcttccaaagcatttttcttaactactggattaatacgttgtgctttaagttgttcaagcgcactatttttgacagtagcgatttctgcatttgtagtttgatcagaaatatcttcagttgcttttgataaaatgtcttctaaaacattcgtaaacgcttctttttcttcagttgtagcatcagcgtcgacatttacacctacttcaatctggtctagtgcagtttctaattcttcgatagctttttgtttttctgttgagtcaatttgaatgttatcaaatgcctcaagtccttgagctttcgctttttcaacttcagcagttgttgttgcatcagtaataccttgtttagcttgatctgtaatttgtttaatcgttgctaatgcttcagttttttcttcagcagttaactgctcactatgatcaattgattctttcgtatcttctgctttagcttcaatagcttggttcgctttaggtttaacagtagcatctacttgaatagcatcaattgctgctttaccttgtgttaatgcatcatcaacgtcaccattatccacaccattattaatgctttctaatgcagtttgaacattttggtcaacttgcttaattgcttgttgcttttcatcttgtgttgcattagtgtcagctgaaatattatttttcttttgatctgcataagcatataaatctgttgtagctgtttcttttttaccggttggaattgtgtaatcattaatattatctaagtcattatgaattcgaacttcaatgtcatctttagaagtagcttgattgacattttgatccgccgtttgtttcaattcagcaagtttttgtttcgcttctgcaatttcacttgaagtcgatgcgttagagttatccgcttcgtttacttttgaattatatgcatctgcaattttcgctaaagcatcttttttgtactcactaaatgttttaactgcattaattttagctttcccttctttaaccgcattatcaacatattcatttgttgatgattgatcgacatttgttttcgcttggtctacatcattttgactattagcagcttcaatgttgctatttgcttgtgtcacagcattatctacgtccgcattagccgctgcaatttcttcagcagtaatgtcttgcgtttgagcgattgctgttttacgttcattcgctttcgtagtgatggcttgtttcgcatcatctttagttgttgttgctggctgaattgcttcaattttagcaatttctgcatttttagccgcttcaacttctgcatttgaatgtgcaccatctattgctgtatcagctgttgttttttcagtttgaacttgttgtttcgcagctgctttttcttcagttgttgcaccattattaacatcaattgctgtttcttgcgcttgtactttgtcagcaattgcttgtttcgctgttggtttaacatttgcatcaggtgtaatagctgcgattgtagcttcacttgtagtttttgcattatctacatctgcatttgctgcagcattatctatatcagcgtttgcagtaactactgcttgatcaactttgtctttcgctgcttgttgttcttcagtagtcgaatcattcattgcttcaattgcagttttacgttcacttgctttttgagcgatttccgctttagcatccgatttcttagttgttgccgcttgtacttgattaattgcagtaataccattgtctttagctgttgcaacttcactatttgaatttgcagcatcaagatttgttcttgcttcttgctttttagtatctaattctgtatatgcagcttgtttttcttctgtagttgaagcattgctattttgaatttcttgtttacgtgtattatatgcgttttctacttccgtatcagctgcaggtttaacttttgcttgtgtttgaattgcattgattttatctaatacttttgattttgtttcagcaacttcctgttttgatttaacaacttggatgtcatgtaaaccttgcttttgagctgcttctactgctgcatcagcttctgctacttcttcattagttgtatttgaaactgtagcattttgagcttttctagctgttgcagcttgtttaacttcattataggcatccatttttgtttgagtagagtcagtaatattttcaatttttgagatttcttcgtttttaactctttctaaatcttgtgcagtcgttgtcgcttcaattgctttaacaccagaaactttagctgcattaatacgctcaatagcttccgctacttcttcatttgttgtatcaggatttaaaggtgcttgatcaatttgtgcttgaacaacttcgtcaaattcttcaagagctgctgctttagctgttgtagcaggtgcagtttgattaatatcattgattgcttttgttttaatggcttctacttgtgcatttgttgttgctgcatcaatatctttaattgcatttgtttcaattttaccaattttatcatttgctacatctttttcatcttgtaatgatgcatttgactttttaatttgttgtttacgagttgtaactgcttggataatatcttgtttcgcttgaggtttaactgttggtgtaatcacatcttgatctaacactgcgataccgttatctttttcagttgtgacaccttgtgctgttgtttgtttattaatttctgcgattgcattatttttatcattgttaattttagtcacaagcgctgcaacttcatcttgcgtaacttttttactttgttgtgctgctgtaaccttttcttgagctttagcatctaattcagcaattgctgcttgattatcaattaatgcagcttgtaatttagttactaaaccgtcaatatccgcttgagatgcacgatttgcagtttcaacatgattcgcatcttcatttaaaatattgtctgcttgttgtttaagtttattgtattctgcaattgatgctgttgtgtaatgactattatcaacttgtgagtttacttgttgttgcaacgcatctttgttcatttcaactgctactgaaaatggatctgcagttagtgtaacttctggttgcgcattattaattacaacatctgaagcagtacgatatgttaatttttcattaaaatcaatatttttaggtgtatcgatattcgcaacattaactttatatgataattttaaagatttatctgggaataaaacttctttagtgtgtgtaccgcgtgccgttgtcacaccttggcttgtaaatgtaactttatttgcagtttgatcataattaacagtcatatttttcaatactgtactgtcttcattaccattagggaatgttgtagttaatgaatcattaacgtaagttacaccttgtggtaatgttacttcatatttaaattgatctgcttttaatgaagcaccaaagttaccattgttaccgatttcagtattaattgtaaattctttattatttgttgctttcggtgctaaatctctatttttgacatataaatgtgatcctgagaatagacctacattatcaatgaatgaatagtatttataaccatctttatttgttgtaattcttgaagcatcagcaactgctgtattgtcaggaataaattgtaaatctaaacgatcagcatctgttggtactttaaataagtgtgcagtaccagtcttagctacatttacagttgctaattcagtatttttcttagcatctttaataactagatttgttgcaccttgcttactattcgtttgcatagtggtaaagttgataattaattctgaatctggttttacattaacagtttttgaaataccgttaaagttaccatgatctgtagaatcatttgcattcacacgacctaatgcagctacatttcccctagcttgatagttttgagggttattcttatcaaacatatcgcttcgtcttaattctgagttaacgaaaccaatcttaccgttgttaattaatgaataaccgtttactttatctgtaacagttacagttggatcctgtctattctcatctgttgatatggcaggatcatcaaacgttaatgttgtattaatactgccttcaccagtattgctagcatttggatcttgagtttgtgcgtttgctgctacaggtgctgctggttgcgctgctgctggagcattcgctggctgtgtttgatttgccggtgttgcattattattaggtgttgcttggttatttccttgacctgcttggtttgccggtgctgcttgatttccaggttgtgcttgtgcagcgttattcggatcagcttgattaccttgtccagctggttgtgtatttggttgtgctgctcctcctgctggattagcctgtccaccttggtttgctggttgtgctgctggttgtccttggttggcaggtgcagctggctgtgctgtaggattagcttgagcaccagcatttgcgttaggctgtgtattggcatcagctggttgtgctggttgattttgtgcaggctgattttgctctgctgcagacgctgttgtcgggttagtagatataaaagtaacagtggcaattaaagctgaaaaaataccgacattaaattttctgatactaaatttttgttgtctgaataaattcattaagtcatcctcctggttgattattctcgctgttaaatgatttcacttaatcaactgttaagataagtagtagcatctgcgttaaaaacacaaagcaactctatctaattaaaattaattttatcatcattatatattgagtaccagtgtattttatattacatattgattactttgtttttattttgtttatatcattttacgtttgtactataaattatttctacaaacacaaaaaaaccgatgcatacgcatcggcttatttgtaatacagtatttatttatctaatcccattttatcttgaaccacatcagctatttgttgtgcaaatctttcagcatcttcatcagttgctgcttcaaccatgacacgaactaatggttctgttccagaaggtcttactaaaattcgaccttctccattcatttctacttctactttagtcataacttctttaacgtcaacattttcttcaacacgatatttatctgttacacgtacgttaattaatgattgtggatattttttcatttgtccagctaattcacttagtgatttaccagtcatttttattacagaagctaattgaataccagttaataaaccatcaccagttgtattgtaatccatcataacgatatgcccagattgttctccacctaagttataattaccgcgacacatttcttctactacatatctgtcgccaactttagttttattagatttaattccttcttgttcaagcgctttgtaaaaacctaaattactcataacagtagaaacaatcatgtcattattcaattcttgatttttatgcatttcttgaccaataataaacataatttggtcaccgtcaacgatttgaccattctcatctactgctataattctgtctccatcgccgtcaaatgctaacccaaaatcactttcagtttcaactactttttcagctaatttttcaggatgtgtagagccacatttctcattgatattatatccatcaggactacatccaattgtttcagtatctgcttctaaatcaccaaataagaatggcgctagtgatgatgttgaaccatttgcaccatctaaaacaattttcaaaccttcaaagttaacatctactgttgattttaaatagctcaaatatttttgtgccccttcaaagtaatctgaataatgtacaatatcattgccaactggtcttggtaattctgggttttcttgatccaataatgcttcaatttcattttcttgttcatctgatagtttaaaaccatctgatccaaagaatttaataccattatctgcaactggattatgagaggctgatatcattacacctaactctgcacccatatcgcgtgttaaatatgcaacacctggtgttgaaataatacctaatcgcatcacttctgcaccaattgaaatcaaaccagctattaatgctgattctaacatttcacctgaaactctagtatcgcgacctacaagtacacgtgggtgtttttcacctttattatgtgctagaacatagccaccgtatcttcctaatttaaatgccaattcaggtgttagttcttggtttgcgacacctcttactccgtctgtaccaaaatattttcccattgtttactctcctttaatttagctatttattttacatttatataagccttcgtttcacttggttgtgctttagtgacatgttctggtaaattgatttttacagtcttttcagttgattctgaaataccatctaaatctacttctgcatcaacttcgcttatattttgcaagtcatctcgactaccgaagatttcaatttctttatcttctaagtcaatcgaacttaattctttatcatctgctaaactacctttctgtttaacatttactttaacctttttgtctaaaaggctctactttaacttgtaaattcacttcattaggttgaatcgatacatttaatttattcagttttttatcaaaagccgttacttctgcgacatcttttgtgtcaccattaatctttttattagttttaaaagtggcttttaaataagcaatatcattcaattgttcttctccacctgttactttaactgtttgtggtgaaacttcttgctttgtaattttaaaaagtggatcaatatcactctgacttacatcaggttgaactgtcatctttttagttactttgttttcaagcgtaatatttgctaatttaggttttacagaataatgaatgtcatcagctaaccctttaacttgatacttctcttgatattttccagctttagcatttgataaatcaatcactactcttaaatcttctggattttcaatttttattatctttgattgtggtcctgaaatagtcacattaactgtttcaggcgcttttgttaaatgcaaatctttagtgttataaagaatttcaacgggtacatcttgaatcgttttactagacttttgaccaagattaccagtgttaaagatatttccaaaaacattgttaacagataaaaagaaaaacaatgccaaaagaaaggcaataaatctcaagccccatttactttctagcatattatttcacacctttcttttgaaagcgtgtgccaaaccaatgttcagcaagcaactcttcaaaaatttcgtttgaaatgtctcgtcgtaattttccatcaaatgttaccgaaatatcaccagtttcttcagatacaataacggtaaatgcatcagatacttctgaaataccaaccgcagctctatgtcttgtacccaaacttttagatatcttaggactatcagacaatggcaaataacttgctgctgctgcaatcttcgtgccttgaataatcattgcaccatcatgtaaaggtgtattaggtataaagacattaattaaaagttcttgcgaaatatttgaatccattgcaatacctgtttcaatataatcttgaagacctgtttctttttcaaagacaattaatgcacctatacgtcttttagccatatattgcacagcctttgaaactgattgaatcaatttctcttcatctttactatacgtattagaagtatagcgttttaaaaagctacctctaccaagttgttctaacgcacgtctaatttctggttggaatattactattaaagctaataccccccattgaataacgatatcgaataatttagatgttgcagtcaagttcaatatcatacttatctgctgaccaataacaattactaatatccctttaagtaattgtatcgctttagttcccttaaagaccgtgatgagaagataaagtacataccaaactatcagtaaatcaaggatactcgttacaatttttaacgtactgaggttttgaaaaaagttggaaaaatccataacatctcctccgggtaatatttttccataatacccattataccaatcatttacatcactgtcatacgaacatatatttaaatagaaaaaatttattttaaagattataactactcttaatcattttagtgaattaaaaaaagtagtgcaaaaagcaaaatatactttatacactacaaatcatttatttataataaagtttcaccaaaaaatgttccaactaacgaaaccgcttgttcagcagtatgattattactgtcaatcaatggatttacttcaactaaatccattgaggaaattaaatgtgattgatgcagtaattccaatgcaaaatggctttctctataactaagaccacccaaaactctagtaccagtgcctggcgtttcaagcggatctaaagcatcaacatctaaagataaatgaacgccatcaacattgcgtgacttcaaatattctattgtattttcaattacttcctttatccccaatttatcaatatctgacatagtaaatgttttaatattatgatctttgataaattgtctttcacctttatctaaatctctcataccaattagtacgatgttttctggcttgattacattactatttaattctaaaagttctttgggaccttcacctgtcaaaatccttagaggcataccatgaatatttccacttggtgactcttcaggtatatttaaatcaccatgtgcatcataccaaataactcctaaattattataatgtttacttattgctgatactgaacctaccgcaatagaatgatctccaccaagaactagaggaaatctgttattttcaattgatgctgaaacttctttatttaatttttgattaacatctataatttcatcataatttcttaatcctttttgttcactatgaaatttttcaatgttcacagcaggtaccttaatatcccccttgtcatatacatcaaggtctaattgctttaatcttgaaattaatccagcatatctaattgctgttggtcctaaatcaacacctaattttctttgtccaaatgttgatggtgcacctataatatcaattgcttttgtctttgtcataagcgtccccctttgctctatgtaattaaagaataatgtatgcgcttaccattatcaagcaatagctacacatataatctgtttatcttattacttcataaaaaaaagcactttccaaaaatggaaagtgctagtagtgagccatagaggattcgaacctctgaccctctgattaaaagtcagatgctctaccaactgagctaatggctctaatggctgggctagctggattcgaaccaacgagtgacggagtcaaagtccgttgccttaccgcttggctatagcccaatatatagatggtggaggggggcagattcgaactgccgaacccgaaggagcggatttacagtccgccgcgtttagccacttcgctacccctccagcttattcatataatttaataatcaaaatggtggagaatgacgggttcgaaccgccgaccctctgcttgtaaggcagatgctctcccagctgagctaattctccaaaataatgactcctacgggactcgaacccgtgttaccgccgtgaaagggcggtgtcttaaccgcttgaccaaggagccatggctccacaggtaggactcgaacctacgaccgatcggttaacagccgatagctctaccactgagctactgtggattaatattatgcctggcaacgttctactctagcggaacgtaagttcgactaccatcgacgctaaggagcttaacttctgtgttcggcatgggaacaggtgtgacctccttgctatagtcaccagacatatgaatgttgattttacatttcaaactagatagtaagtaacagtgattttgcttcgcaaaacacttattgtggattaagtcttcgatcgattagtattcgtcagctccacatgtcaccatgcttccacctcgaacctattaacctcatcatctttgagggatcttataaccgaagttgggaaatctcatcttgaggggggcttcatgcttagatgctttcagcacttatcccgtccacacatagctacccagctatgccgttggcacgacaactggtacaccagaggtatgtccatcccggtcctctcgtactaaggacagctcctctcaaatttcctacgcccacgacggatagggaccgaactgtctcacgacgttctgaacccagctcgcgtaccgctttaatgggcgaacagcccaacccttgggaccgactacagccccaggatgcgatgagccgacatcgaggtgccaaacctccccgtcgatgtgaactcttgggggagataagcctgttatccccggggtagcttttatccgttgagcgatggcccttccatgcggaaccaccggatcactaagtccgtctttcgaccctgctcgacttgtaggtctcgcagtcaagctcccttatgcctttacactctatgaatgatttccaaccattctgagggaacctttgagcgcctccgttaccttttaggaggcgaccgccccagtcaaactgcccgcctgacactgtctcccaccacgataagtggtgcgggttagaaagccaacacagctagggtagtatcccaccagcgcctccacgtaagctagcgctcacgtttcaaaggctcctacctatcctgtacaagctgtgccgaatttcaatatcaggctacagtaaagctccacggggtctttccgtcctgtcgcgggtaacctgcatcttcacaggtactatgatttcaccgagtctctcgttgagacagtgcccaaatcgttacgcctttcgtgcgggtcggaacttacccgacaaggaatttcgctaccttaggaccgttatagttacggccgccgtttactggggcttcgattcgtagcttcgcagaagctaaccactcctcttaaccttccagcaccgggcaggcgtcagcccctatacatcaccttacggtttagcagagacctgtgtttttgataaacagtcgcttgggcctattcactgcggctcttctgggcgttaaccctaaagagcaccccttctcccgaagttacggggtcattttgccgagttccttaacgagagttcgctcgctcaccttagaattctcatcttgactacctgtgtcggtttgcggtacgggcacctattttctatctagaggcttttctcggcagtgtgaaatcaacgactcgaagacacaatgtcttctccccatcacagctcagccttaacgagtaccggatttgcctaatactcagccttactgcttagacgtgcaatccaatcgcacgcttcgcctatcctactgcgtccccccatcgattaaaacgattataggtggtacaggaatatcaacctgttatccatcgcctacgcctgtcggcctcagcttaggacccgactaacccagagcggacgagccttcctctggaaaccttagtcaatcggtggacgggattctcacccgtctttcgctactcacaccggcattctcacttctaagcgctccacatgtccttacgatcatgcttcaacgcccttagaacgctctcctaccattgtccaaaggacaatccacagcttcggtaatatgtttagccccggtacattttcggcgcagtgtcactcgactagtgagctattacgcactctttaaatgatggctgcttctaagccaacatcctagttgtctgggcaacgccacatccttttccacttaacatatattttgggaccttagctggtggtctgggctgtttccctttcgaacacggaccttatcacccatgttctgactcccaagttaaattaattggcattcggagtttgtctgaattcggtaacccgagaggggcccctcgtccaaacagtgctctacctccaataatcatcacttgaggctagccctaaagctatttcggagagaaccagctatctccaggttcgattggaatttctccgctaccctcagttcatccgctcacttttcaacgtaagtcggttcggtcctccattcagtgttacctgaacttcaacctgaccaagggtagatcacctggtttcgggtctacgaccaaatactaaacgccctattcagactcgctttcgctacggctccacatttactgcttaaccttgcatcaaatcgtaactcgccggttcattctacaaaaggcacgccatcacccattaacgggctctgactacttgtaagcacacggtttcaggttctatttcactccccttccggggtgcttttcacctttccctcacggtactggttcactatcggtcactagagagtatttagccttaggagatggtcctcccagattccgacggaatttcacgtgctccgtcgtactcaggatccactcaagagagacaacattttcgactacaggattattaccttctttgattcatctttccagatgattcgtctaatgtcgtcctttgtaactccgtatagagtgtcctacaaccccaacaagcaagcttgttggtttgggctcttcccgtttcgctcgccgctactaagggaatcgaattttctttctcttcctccgggtactaagatgtttcagttctccgggtgtgccttctgatatgctatgtattcacatatcgataacatgacataactcatgctgggtttccccattcggaaatctctggatcaaagcttacttacagctccccaaagcatatcgtcgttagtaacgtccttcatcggcttctagtgccaaggcatccaccgtgcgcccttaataacttaatctatgtttccaccatttttataagtcaaacgttaacatacggcttcgttttcattattttaaatactcatttacataagtaaactctgctttaaaataatttaactcattgtctgctaaacgttttcttttataaaaagatttaaacgcgttattaatcttgtgagtgttctttcgaacactagcgattatttcttatgaattcaagcttatttaaaactctttattcactcggttttgcttggtaaaatctatattttacttacttatctagttttcaatgtacaatttctttttagtcaagcgctcgcataagcaatatcgctttaaccaaaaaatatttgaatgtaaaataaacattcaaaactgaatacaatatgtcacgttattccgcatcttctgaagaagatgttccgaatatatccttagaaaggaggtgatccagccgcaccttccgatacggctaccttgttacgacttcaccccaatcatttgtcccaccttcgacggctagctcctaaaaggttactccaccggcttcgggtgttacaaactctcgtggtgtgacgggcggtgtgtacaagacccgggaacgtattcaccgtagcatgctgatctacgattactagcgattccagcttcatgtagtcgagttgcagactacaatccgaactgagaacaactttatgggatttgcttgacctcgcggtttcgctgccctttgtattgtccattgtagcacgtgtgtagcccaaatcataaggggcatgatgatttgacgtcatccccaccttcctccggtttgtcaccggcagtcaacttagagtgcccaacttaatgatggcaactaagcttaagggttgcgctcgttgcgggacttaacccaacatctcacgacacgagctgacgacaaccatgcaccacctgtcactttgtcccccgaaggggaaggctctatctctagagttgtcaaaggatgtcaagatttggtaaggttcttcgcgttgcttcgaattaaaccacatgctccaccgcttgtgcgggtccccgtcaattcctttgagtttcaaccttgcggtcgtactccccaggcggagtgcttaatgcgttagctgcagcactaaggggcggaaaccccctaacacttagcactcatcgtttacggcgtggactaccagggtatctaatcctgtttgatccccacgctttcgcacatcagcgtcagttacagaccagaaagtcgccttcgccactggtgttcctccatatctctgcgcatttcaccgctacacatggaattccactttcctcttctgcactcaagttttccagtttccaatgaccctccacggttgagccgtgggctttcacatcagacttaaaaaaccgcctacgcgcgctttacgcccaataattccggataacgcttgccacctacgtattaccgcggctgctggcacgtagttagccgtggctttctgattaggtaccgtcaagatgtgcacagttacttacacatatgttcttccctaataacagagttttacgatccgaagaccttcatcactcacgcggcgttgctccgtcaggctttcgcccattgcggaagattccctactgctgcctcccgtaggagtctggaccgtgtctcagttccagtgtggccgatcaccctctcaggtcggctatgcatcgttgccttggtaagccgttaccttaccaactagctaatgcagcgcggatccatctataagtgacagcaagaccgtctttcacttttgaaccatgcggttcaaaatattatccggtattagctccggtttcccgaagttatcccagtcttataggtaggttatccacgtgttactcacccgtccgccgctaacatcagagaagcaagcttctcgtccgttcgctcgacttgcatgtattaggcacgccgccagcgttcatcctgagccaggatcaaactctccataaaaattatgatgtttgattagctcataaatactaaataatgtttgtaacttatagttacgtttttggaattaacgttgacatattgtcattcagttttcaatgttcattaatgttcaatctcttttattgtacttcgtttaattgttgaagtcaataactttttgaacgattactttatttattctatattgtttttataattatttcaatggtaagttttacacttttgaaattcttctttaaaaacatcgtcgccgtttttgacgactttattatcttatcaactttataatttaaagtcaataacttttttgaaaaacattcgtgtttgcaaaccgcttcttttttcaatgcgttgattgcttaacacaagaacttattttaccagcattctaaaacaattcaatataaaaacgtacaaaataaaagtaattttgtacgtttagcatatattatacctatttatttgtagcagctataactttttgtgcaatcgagctataaattttacctagacgatcatctgattgatatattgacggtgcaaaatcttttggattccaagatggttgctctaaaggtaattccccaagtaattgagtattaagttcatcagctaacttagtaccgccacctttgccaaagacatattctttattacctgtctctttactttcaaaataactcatgttttcaactacgccaagaatagaatgatccgtatgttttgccatcgcacctgcgcgagctgcaacaaatgctgctgtaggatgaggtgtcgttacaataatttccttacttgaaggtaacatcgtatgaacatctaaagctacatctcctgttccaggtggaagatcgagtattaaatattcaatgtctccccatttaacttctgtaaagaaattcgtcaacattttacctaacattggccctctccatataactggcgcattttcttccacaaaaaaggccattgatataactttaacgccatgacgttcaactggaattacttccttccctttaattccaggcttttcatcgatacccatcatatctggtacactaaatccatatatatcggcatctactaatccaacttttttaccttcacgagctaaggcaacggctaaatttactgcaacagtagatttaccgacgccacctttacctgaagcaatagcaataaattcaactggattattttgagataacagcccttctatcgttttaggtttattttcttcttttggtttaaattgatttactttttcttctggtaacgtttcaaatcgtatacccacagtttttgcaccattttcttttaaagcattaacaactgccatctgtaaatctaattgcggtgcaccacctaattgtgccattgccaatttaacacttacatgttctttttcttccttaatagaaacttctacaataccttctgtttcttttaaaggtacatctataataggatctttaatttctcctattagttctttaacttgatctaccgttaacaaagtaaatcccccttaatcaatttaaaatatctacataattgcaaatgtcattttttacgtagtctatcaataaaagtataaaacttttcattaaataaaaaaagaagttagcctattattttcaatagaccaactactcatattattttaaaatttccttctattactttcaatctcttcaggttctctgataaaaattgctatcacataagcaatcataactagaactgctacaaatccaaatgagatatctactccaatagcaattgattgttgttttatctcatttgaagttaaatgtgatggtgaagttgataaaaatatttttgcaccaaaactcattaatgtaaccattaaagctgtgcctagtgaaccagccattacacgaccaaagttcataatagccgtgccatgtgagatttcttcatttctcaaagaattaattcctgtagtatttatcggcatcatgagtaaagaaactgaaaacattctgattgcatatacgactattaaatacgtataagatgtgtctgtatgcaagaaacacaacataattgtagtaattgttaaaattgtaaaaccagtataaatcaatggcctaggaccatacttatcataaaatttacctgtaaaaaccgacataataccatttattattgcaccaggcatgataactagtcctgataacaaggcagataaagataaactgttttgaacatatagcggtataagcagcgcgggtccaaccattgacatcataataatcattgaactaatcgtacataatgcaaatgttctatttttaaaaacccttaaatttaaaagtgcattactaatattaaattgtctacgtataaataaatagataataaccatacttattatcaatgcacctattactattggacttgtaaatcctaaatctcctgcactactaaatgcatatagcattaacccgaacccaatagttgaatacattactgagcgcttatctaatttagtatatttcacttcattgtaactcgagattgaaaccaaaccgaaaacaaaggcaactaaagcaattcctacaattataataaatggtactcgccaactcgcttgatcaatgattaatccagtaactgtaggtcctattgctggtgcaaattgaattactaaacctgccagccccattgcaaaacctcgatgttctttactgaacaatgtaaataacgtaaattgcattaagggcataagtacccctgcacccatcgcttgaattacacgtgctaacattaaaactccaaaattcggagctaaggctgcaacaatagaacctaataaaaatgtccccatcgctgctaagtataaaggtctagttttaatcctatccattagatatgccgtcagaggtatcatgacgccattaacaagcataaacccagtaactagccattgcgatgtactttcattaatatttaattctctcattatactaggtaacgctgtatttaataatgtttgatttaaaatagctacaaacgcactaatcaacataacagcaactatgaagtttcgtctccgggttgttaattcaactttagccatcataattcctcctttttaaacagatgtacacttgtccctttaatacatatagccattaacataatgggagtagtactcaaatgataaagaagcactacatattaaatcattattggttcttgggagtaggacagaaatgatattttcgcaaaatttatttcgtcttcccaccccaacttgcattgtctgtagaaattgggaatccaatttctctttgttggggccccgccaacttgcattgtctgtagaaattgggaatccaatttctctttgttggggccccgccaacttgcacattattgtaagctgactttacgccagcttctgtgttggggccccgactagaattgaaaaaagcttgttacaagcgcattttcgttcagtcaactactgccaatataacttcgtagagcatagaacattgatttatttcccagcctgacttaaaaactaacaatataacattgtagcgcttaataacttattttatgtctcagactcatacaatggttatttaacttatttaccacaaattgagcactaagactcactattatcgattgttctattgaacaaaaagaagttggaacacatatgtgcactcaacttcagatatctattttctattatttaaatttttactttcagggtaaaattgaagcttacaaacatataagaaccctataataaccatgattacccaaaaatcgatattgatataaacataatttaaatgaatgatgaaataaaataacgttgttgcaactgtgtaagaaatcaaatgaaaagtcgcgcctctaaaatatgcattttcaggcaacatttttctaaaataatccattaaatgctcgactgcaaatatgatgaagtacccaaagattatataactaccataatataataggttatcgtacatacttctattatatgtaaagtcacccaacctaaaataaataagtattctacttaatccatataaaccaaaccctagaaatgttaaaaaaatcgcaccagaaagtacaaaaataaagagaacaatcattgtagttaacaagttataaaacttatgtttaagataattcacaatcattggcctccttattaataaaatattgaacgatttatctagcatctagtaaatttattatttcttactttaattacactacatcaattttaatcataattctattcttttgattgagatgactgttctttaaaaaatacgacccataaaacaataagcccaatgctaattacagcaacagcacttaacacattgtgtaagtttggaccaaagattcctgattgtatcgcataaagatatcccattattgttgaacctattgatgccccaagatttttagttaatccataaaaagacatcatttttttcatttgtaatgggctagtttcttcttggacaattacactatcttttgtataaatatatccaaaacttaatcctgccaaaattaatacaaatgcaataagtaacggaaatttaataccaaatgaaatgataatactacttactagtagcaacgtaaatgatagtaagtaaataactttccttgatagttttgcttcaattcgatgtaaattaaaattcaatgtaatccaagctacagataaaggaaaaataaccaatccactttgtaatggagataatcctagttgttcttgaaggtagactggaatatataaattgaatcccattaaacaaatagctgttagaaggtcagttataaaaactaaagtaattgaacgattaaattcaaccacaggtaaaaatggtgaagaaacatgtttttctactttaaataaacgtattgccacaacgatagctaagataaaacttaagaaatttaaaagtaatagctgttggtttaataaagcaaacataatcaatccaataaatacataaaatagcgtgagccctttagtatcaaattttgatttagcaactgtttcttcctctggaaaatgaaatgtccatacaactaatataatggcaatgatcgcaatcggtatatttatgtagaataaccaatgccatgttgcaaattctaatataccaccacctaaaagcggcccaatgatactcgaaataccccaaacactgccaactatgcccataattttatatcgtaacggaatttcaaatgctaactttggaacaatttgcgataatgacatcaatacacctgatccaaaaccttgtatcacgcgtgatataattagcatagtaaaattagtacttaaaccacacatgaaactacctatactaaataaaagtaatcctgcaattgccacataaataattttaaatctcgaaagtaattcgcccactataggattggcaattactaatgcgataaaatacgcggtaaaaattaatgaaattaaatttcctgcatttaaatcttgtttaattgtaggtaatgcaagcgaaataatagatgattcaatcgcagacataaacataattaatattaaagctataacagttatgattgactttaatcgcatgaaatacctccttctatatatatttataagattttatttacaaactattgatttttatatgtataaacacttttgactttcaaagcttaacgataattttattacaatacaatccgctaatagaatgatttatgtaataaaaaaagcggagtttcccccaccttttctaaacgactacataaaatataagattgcaattaaatgcaacagtgatgctataacaataaaaatatgccaaatcatatgaaaatatggtctattcttttgtgcataaaaccatgcaccaattgtatatgacacaccgcctaagaaaatgaataatatgaatatccatgatgtgcgaataaaaataattggtaacaagataatacctacccagcccatcactaaatagacaattaaacttaacttttgattaactttgacagctatggatttatataaaattccccaaagagtcgttccccataataaaataaatactgtccaacctatccaaccacctacaattgttaacaaaataggagtgtatgtacctgaaattgctacgtaaatcatactgtgatcaataatccttaaaatatatttatggggggtttcattttgcatagagtgataaattgttgatgaaataaacatcataaagatagaaataacataaattgacatactaactgatgcaagtgtgccatttgcaatataactatgtacagccgcataaggtaagactaatagtgttaacagcgctgccagcccatgagatgcagcattgcctatttcttctccaaatgacaatggaatgatatccttaaatgtttctgcaattgtgtcattactttttttacttgatttggacatcatagtcaccgcctaacattaaattaaacccattctacgtaaatcttcagttgctgttgcaacactatctttaccttctttatttttaagaggtgaaaactcttcttctctaggaacttgtaacgtgacaaaactagttccataagtaaatatgtcaaaatagaacaattcgaattttaaagttggttgttcaataaccccaaagttctcatctaattgcttcaaattcttaatagctaaatgataaggtaattcacgatttacagcatttaaaataaagccaagtttaaatgcatgaataccgatattagcattgttaaattgatttgcaacttctggatctaattctgaatactccaatactgtatctttacaatcgacattaactaatcgtccaacactttctcctggttttggttgaatcgttttagaagtaatatcgtaatcatgttctaccgtaaatcctgcaaatagtggatccaacacttttactaaaacattatcgatattattcaagaaaatatacttaacgccattattagacatttcttctaagtatcctgccttgtctaaagatttaaacacgccaccattaccattcggcgtttccataatacgaccctgttgatttaaaattaacttcccttcttcactaagcgccacaatattatcttgtttaaagaagtggattgcttcttgatcatatccaaaataactatgtgcttcgaaataagctaaagtttcttcatgattgatatcacttgtcataatataccattgaatcgtatgtccagattgatgattcaatgtttttaattggttagcttgaagttcaaataaacttacaccttcaatttcaaacgaacctttaggtcccttgtaaccaagtcttgttccttgaccacctgccatcaaaagtactgcaaattgtccttctttaatagcttgaagtccttgttcctctaaacgcttaacctcattatcactcatttgtgatttaatatcatatttcacttcagaaactgcagatacatcatctattgttttcttattgatgtataaatcgttatataatttggcaataaaatctaaatctaatgacgctaccttctcttcaagcgcttctttttcattgttactcattattttttcatattcacataaatgatcttgtttatatttagctaattgatttttatctagcattttatgcctcctgctgagtttgtaacctttaataatttattttctataaaaacttagtattccagttgcttattatatcattgatgaaaggctgaaataaaacataaactgttccgaccattaacgcagtagctaaagataagtctacaagtccacctgttttaaattggattggtgtcttcacattaaacggtaacggataaaataatttcacgccttttggtgttatcatatctagtataacatgtgacactaatccaattataattgctaccatataataattaggtgtctgaataatttgcaataaaaatgctatgattgcgataaataatattgaatgcgtaaaggttcgatgtccaaagatcaatctcacaaaaaaactaattatcttaaaccttctgccaatcttactttgagtgtgacatatatcgggtaataagctagctagagttgctagaatgataaccgtaaccgacgaaaaaatatccgtttgaaaatattgtgttgttagcgctccaacgagcatgccgcatgaagcatgtgttttacctgtcatatttgttctcctttaatactcacattttaccatatccctaacaaaaacacgaacatattttcgggttaaacttcattagtatgacacaatttaaaaaagtatcacataactcttgaaaacgattacaaaatcgtttatgatgtatttacaaaatatttaaaggatgtgtttgaataatggcaatgacagtaaaaaaggataataatgaagtgcgtattcaatggagagttgctgatatcaaaattcctacaagtgaaattaaaaatattacacaagaccaagatattcatgcagttcctaaattagacagcaaagatgtatctagaatcggttcaacatttggtaaaacgaatcgcgttattatcgatactgaagaccacgaatacattatttatactcaaaatgatcaaaaagtttacaatgaattaactaaataaattgtataaaaaaatcattcatggtgagggcttcatgaatgatttttttaattgattcaacacccagcataaacaaatacaaaaggacaactgtttccacaattttaacagttgtccttttctatatctaattacaataacaagtgtgccatcaaagaaataatcggtagtgtaatgattgttctaatcaagaaaatcataaacaatttgccgatgcttacaggaatcttcgaaccaagtatgacgccacctacttcagacaagtatattaactgcgatatactaagtgccccaataacaaaacgagttatatcattttgtacaccttcaattaatatagaaggtaaaaacatatcggcaaaaccgataataatcgtttgagaagcctgtgccgcttcaggtatttgcattaactctaaaaatggaacaaaaggtttacccaatatgacaaaaaagggcgtgtagttcgcaataatggtagcaatagtaccaatactcatcactacaggcaaaataacaaaccacatatcaacgactgtttttaatcctgacttaaaaaagtcaataacgcccggtgctttaatacctacttctgttgcagtatcaaagccatgtctcaatgccgtctttccttctggcaatgcctcagtacgcgcactttcaggtacctccttagcatactcatcaggaattttatttaaaggccaaattcttggcataatgactgctgcaacgaggcaggatactatcactgataaatagaaagcaaaaaattgattttgcatgtgcactgtttcagcaactacaattgcaaaggtgatagaaactacactaaatgtcgttgaaataactgttgcctcacgacgagaataatatccttcaccatattgtctacttgtaattaagaccccaacagttccgtctccaataaatgatgctaaattatctaccgtcgaacgtcctggcaatgtaaataagggtctcataaccggcctaaaaataggacccaacatctctaacaaaccgtattccattaatagcggtaaaaatagagctgcaaataagaatactgctactaatgttggcaataaacttgagaacaataatccaccagtttcatctgagtaaataacctttgaaccgattcgtaaaaatgtcatccatgcaaaaacaactgctaatattcgtaaaattaaccaaccaattctaacgttaaaagcattgttcattagcccgtcaggtttcaatttatcttttaaaatagttgaacaaatcagcgttatgatacccgataaagtaattatcgtcacaattaaaaatggcattacgccacctaatacatctttaagcacgcctgctaaaaatgccacgggcaacgttgtttgcttctgtccatcttgttcgactggaattggtactagaaataataagataccaattaaagacatcgtaataaacttaagtctcccaatgattatctctttccttgaaaagctatccataaaatcaatccatttctctatgtattcgttttaagtatatacagaattctattcagttaacaaacatattccttatcattctatcttttaaaatgtttatgtatgcaaaataatgaataattacagttattaaatatacgctatttcttgtaatttttcaagatgaattcaaaaaaggttaagtacaattactgatttcgtacttaaccttttttaactctaatcatatgttagttatttcattcttcgtaataatattaagaagtatggtgcaccgataattgcaatgataacccctacaggaatatccagtggcggatgaatgccacgggctaaaccatctccaaatgttaacaatatagcaccaattaaccccgacatgataataacgtgtaatgttttatttcctattaattgtctcgcaatatgaggtgcaattaatcctaaaaagctaataccaccgacaactgaaattgcggatcctgctaatattactgctaaaattagcaatagcattttaatcgttttaacttttaaaccgagtgcggttgcaacagcatcacctagattcaatacatctaattgataactcaataaaatgatgattggtatcgttattaaaaaccaaggtaatatagtataaatattcgacatatcatgtccatatagactacctgtcaaccaaacaagcgctttgtttgcttccagtggatttctgattaataagaactgcacaatcgccgtacatattgcgcctattgctaaaccaattaaggcaagctttgaacctttaacatcatattttgaaattaaaaatgataaaaataaacttactgcaaaggcacctaagaatgaacctataggtaatacaaacaatggtgctgttggaaagatcataataataatcacagcagataaactggcacctttagaaatacctataacatcaggtgaggctaacgggtttcttattacagcttgtataattgcacctgatatagccaagctactaccgataataataccaagtaatgttctaggtatacgatactcatttaaaataaaatcatcctgtgtaaagattcccttaatagcatcaatcggatgaatcatgacagaccctacacataaacttataaatatactcacaattaaaaggattgtgattaaactataacgacgtataattttcgttgtcatcatattcttttcacccctttaatcgttataaataagaagtaaagtgcacctacgaatgatgtaacaatccctactggtgattcataaggatatgtaattaaacgacttaatacatctgatagtagtaacaaatctgcacctataataaatgttaatggaatcatgactaaataattcttactcacatagcgtttgactatatgcggtacgattaagccaacaaatccaattggtcctgccactgacaccgacatacctgtaagaataatgactaatagtccaatgataattctaactttatttatattttgacccaatcccttagcaatgtcatcgcctagttccataatcgttagttgacgtccaataaaaatcgttacaattaaagcaccaataatccatggtagaatggtcaaaatttcatcccacttcatactggataatgaaccgacaagccaaaacatcacttgttcgtttgaattctcattcaaaataataataccttcagtcatactactaaaaaacaaatggatggccataccagccaatgctaatttaatgggtgtcatacctttcgtagcacctgaaagtgtataaacagttaaaccacctataaatgcacctatcaaacctaaatataatgcataatattctaatgatggaatgataatcgtcacaaatacaatgaaaaacgatgcaccagaactgacaccaaaaattttaggtgatgcgagcggattgcgtgtcatcgcttgcattaacaaaccagataccgctaatgcaccgccaataaataaccctgcaatcatccttggcatacgtacattatgcaataaaaacgttgctttcgtatctgtatgaccagtaacatagtgaacgatatcgctaaaattaattttcgaagaaccaatcgccatatttaaatatatacaaataaaaagaaagcacaaactcactatatacgtgagtgttgtgcgtctttttcttttatgatctatggcagattggctacttatttcttttatagccatttacttccaccttacttttgttctttttttgataattcaacaagttctttagccatttcttcagaagaaattaagccacgagatcttgcccaaacatcacggtcaacaatatccacgcgattatttttaactgcgttcaactttttccaagttggatcttcttgtaacttcttgaattcagcagaatcttttttagcattatctgtcataataatcatgcgttcaggatttaagtcagctaaatgttcagtatctaattgtaagtaaggtcctttcaagtatttacttaaaccttttgttacatcatcacttaatgcatttttaaatccaagttcgtttaaaaattgtccaacatatgaatagtttggatgtgctaataaaccagctttagcaacaactgctggaagcactttttgatttctatcaaacttaatttcatctttatactttttgattaatttatcatgttcagcaagacgcttttcgccttctttttctttatttaaagctttagcaattgttttgaacgaattaatgttttgtttgtagtctccatcaaaactctttaatgataatgttggtgcaattttgtttaattctttattaatacctttatgtctactgctatcagcgataattaaatccggttttaatttactaatttcctctaagtttggctgtttacgtgtacctacagaagtataatccccaattttttctctaactggtttaatgatacgttttttcttaccatcatcagcaataccaactggtttaacgtctaatgctgctaatgcatctgcaaatgagtactctaatacaacgatacgttttgcatctttaggtacttttactgtaccattttcatcttttaccgaaatagtatctttagttgatgattcttttttacttgaattatccgtattaccacaagctgcaactaaaaataaggcaactattaatcccaatatactaaaagtttttagacctctcatcgttccactccttaatatgtataacttcatttattattttattgataacaattatcattgtcaagtagcgttcgatctttttatattactaaaatgtatgactatacatattccctctaataattatgactacaattagcacatttccttagacaaaatactgataatgtatcatggctatatcatctttgaattaatacaattgacaccatttagaatgaccgttatctctttaattcagctgatattacctattgcagttttatgtgacgaactgttgcacttaatttgataaatcaacaaatacaaaaaatctaagttgaacaattatgatacaaccgtgtaaacgatatgtagtataactagtcaacttagacttattgataaatatattaatattggtttaccatagcaggagatttcacatcaaaattttgaagtagcgtatcaatctttgaatcatcaatatataccttatgtaaatttttcatatacatcgaatgagaaagtgcttcataatttaatgaaaaagatatatgatctcctacttgatagtgtccttgaccatttaaatcaagcattaaatgatcactcgaagcgcctaaaatattgatatgctgatccataggtgaaatattatcgacttttgtatctaaataaccaatatctacaatagcttgtatgaatgattcatgcgtttctgtattaactcgaggtttaatttctaaaatctcagcctccaatgtaatcgcatcttgatataacatagctatcgcttgatttgtcgttgtatcaacacctctaaacaacgtttcacctattcgcaattcatttattttacccaaatcattatataaaagttgtggtaacatgctcgaattaccacctgaaataattttcaatcgatatcctatttctctttcaacagctgagacgaatcgattaatcataaagatatcatcatcacttggcgcatcagatttaaaacacataaaattgaatgctaaaccaacaaaatggatatttttcaagtgaatgatctctttaatataatctaaaacatcataagtcagaacaccttcacggccatctttccaatctaccattaataaaatcttatgtttttttcctaaaacttctgctacttcatttatttgatgtatggtagataattctgtttggatactcatatcaactttttctatcatatctgaaatctcttttttggcaggcgtacgcaataacgtatatgttaaatcctgatctgcaatactaattatgttatccaatctggattctgcaacatgattgatacctaacgcttttaagctttctacaattgtacggtcaccagctatgcacttaattactggtgtgaattgcatatttttactttgaaaaactgtttgaagtactttggcgttatatttaatcttcgatatatttatgttaacgtgtgccatgtagtactacacctctttttttatcggattatctaactcaatatttaaatattgctttactttattttccattctcatatttaacaacgctttgacagtaattgttggtccaaacaaaatattttttaactcatttgcatgtggtagtgttgggttaatggcatgcgctactacttgctgtactatgttaaataattcggcttcttcaacacaatcatactgattaaaatgatggattaattctgccatttgattttgaataacagcatgttggaattttgcaatcactgcatctatagaatcagctattaaactatcatttgtaattttaatatctgatacacgatgttgtaatgtttctaaatctattctagaaccacctaaatctctcactaaaaattgaatgtcaaaatgtgtccccaagttcactactgtattttgcatgtgtgcttctaatgcaattccataattttgaataaaagcaattaaaggcgggattaatgcttgagagtatcgttcaataaatgtcgtaatactttctttagtaattccttgatttaaccactctaagtaactatccacgataactttttgatctattggatttttattaactagacttgcactaactactgttgcaccttttccatcaatttcaggcttttgtcttataatacaagcaagctgacgcgccctatctttatcaacatttgcatattcaccgaacggttccatagcaactttaaatcctggatattgattcaacatgttttgtaaagcataacttaactttggtccatctacagtagtcacagttgagactgttctaacggcacttgttgcttgtgcatcgacgggcaacttaacatgatatggtttatcaattaaagacatcgtcctgaatgataaagttgcttttgaaagtattgtaaacggcgttggaattaatatttttttagcaatccatgcttcaaaatatttccctatcgtatgatcatattgccaaggatgtactaaaatcgctctatagtcttcacttttcaaacctaaactcttcaaaaacacacgaatctgattgtagtattcgggaattatttcatcaataataaattgatcattaccatccatagctgtgcacacaacatggtctttttcaatcatcataatttgcaaagggatttctttttcaaactcaggtgcatatgctcgtacttcttccatagttaagggcaatttcgttttggttaaagggtgtgttggatgaccctctggtaccaaactctcagaataagttaaatcatctgtcttatcactatcttttacatgttgtaaccatgaaaaaaagttaatatcttgtggtaatcttgaaaatttaaaactttgacttattaatgtttgtctgtgagacatttgcttatatgtttcaactaaactatctcgactgtgtattaactcttcgcgtagtcgctctgaaataaggatttcaaaatcatcgttcaatacatctagtagtccttctaacgtcatgattagcgacgtttcacctttattcagataagtaatatcacctgtaaactcatagcgttctaatgcactttttctaacaacttcaatagtcaacacatgcatatgatactgaatttcaattaaagattctttttgtgaaataaacgtttgctcggggtaaatacgttctttaataatggcgttaattacacgatattgaatatttctatctgcctttgcccattcaagatataccatgattactttcctccaactttaacttcaactttctatttataaaatagaataccattgtaatgcatatagtacttattcccattattgaaaaagttctaacaatgccaaacacatctgcacatatactcattaacagacttcccaatggaatcatacctctatccatcataataatactcagtactttaccacgttcataatctttaacattattttgaaaataaacgcgatttgtcgtacgtgcccattgactaaataacccaatcaatgtaatacaaatgaacatgatgacaatattgtgaaataccacacctaataaagcaatgccaaataataatgaacttaaataatacatatttaccataccaatatatttaagtactttaggtaaaactagcgttgcaataataccaccaatggcacacatcgtcatagcgataccaaatatttcagatttccccggaaatactttgtttgttaaaactggtaaaagtgtcgtatatgaaaaacctgtcgccataatcaataaagatgttataaatatttgtcgaccttccatatgtaatttgaagtaatctataatgacttttaacggcatgtatcttgttgcatcttcaggtattttagttactttaaaatgtaatggtaaacataataaaactgcgataaaataacaaattgcctgtgcaagaaatgttgttggcgcatgatagactgctaatatgacaccagcaatggcaggccctattgaacgacaaatattaatgatgaatgaatgaaatgatacagcttgtgtagtagatattttatctgataaatctggtaagattgcttgtcttaaaggggtttcaaccgcacttaaaatccctcttaatgtcgcatatataataatgacgctaattggaattgcagtgaaactatacgtaagcacacataaaattgcggttactaaaaatgatgatgaaattgtaattctcagcaatcgccctttatcatatttatcggcaattgcccctgcccacacacttagtaataatattggtacaagtctgcaaaaattgacaatccccagataaactgcgttatgataagtggtaagcacaaaccaatttagccctatttgtccaatccaattacctagaaatagtagaaaagaactgctaaaaaaatattttgtcataaaacttacacccgcattctgttgataataagaatcattatcattaatatggattatacaaatctatcttgcttttgtaaaatatttcatagaggtgaattatgaacttgaacttaatttttaaagaacagacattaaaatttaacaaagaagaacaagaaacatatttatttttacaacaacataatagcgattgggctaatatttttaaagagatgattttacaaggaagagataaagtcactcagagattagtcacatcaatgcatcgcgaaaacttagttaaagcgcgtactcaaagtaagaaaatattgagccgtgatttgattatgttagatatctcaacgactcatatactagaaatccagttcccacaagctaagcaaacattatatgctcctatcactggagaacacgcctttgatcgaattgatgttgaaggccctttctacattaaagatgacattacaaatacgattacacgagtacaccatccaaatgaaattcttgagtgtattttaattgaagcaccaaatttaaaaaatgctgctagtgatcaatttcagcaagatttaataaacagtgcaactaatatgacatttgcaattagctatcaagcactgtcaatgcaacatgattctgcacctttatttaatattatcgaaaatagcgaagatagttacttgcgttcagagcaagccgttattgaaggtcatccgctacatcctggggctaaattacgtaaaggtttaaatgcattacaaacattcctatattcttcagaattcaatcaacctattaagttgaaaatagtactgattcacagtaaattaagccgtactatgtcactgtctaaagattatgatacaactgttcatcaactatttccggacttaattaaacaattggaaaatgaatttacgccaaactttaactttaatgattatcacattatgattgtacatccatggcaattagatgacgtattacattctgattatcaagcagaagtagataaaaaattaatcattgaagcaaaacatacgttggattattatgctggtttatctttcagaacattagttcctaaatacccagctatgtcgccacacatcaaattgtcgacaaacgttcatattacaggtgaaattcgtacattatcagaacaaacgacgcacaatggtccactaatgacacgtattttaaatgatattttggagaaagatgtcatatttaagtcctatgcatcaacaattattgatgaagttgctggtattcatttttataatgagcaagacgaagcagactatcaaactgaacgaagtgaacaattaggtacattatttagaaaaaacatataccaaatgattccacaagaagtcacaccaatgattccttcaagcttagttgcaacctacccatttaacaatgaatcacctatcgtgacattgattaaacgttatcaatcagctgcatcattgtctgattttgaatcatcggcgaaatcgtgggtcgaaacttatagtaaagcattgcttggtcttgtaatcccactagttactaaatatggcattgcattagaggctcacttgcaaaatgctattgcaacattccgaaaagatggtctattggacacgatgtatattagagactttgaaggtttaagaattgataaagcacaactaaatgaaatgggatacagtacatctcatttccatgaaaaatcaagaattcttactgattcaaaaacgtctgtgtttaacaaagccttttattctaccgttcaaaaccatttaggcgaattaattcttacaatctctaaagcatcaaatgattcaaacttagaaagacatatgtggtatatcgttcgtgatgtactagataacatctttgatcaacttgtactttcgacacacaaatctaatcaagtaaatgagaatcgcataaatgaaattaaagataccatgttcgcgccatttatagattataagtgtgttacaacaatgcgtcttgaagatgaggcacatcattatacttatattaaagttaataaccctttgtatcgagaaaataattaaaattatagaattttattaatcgtgagctcaaagattacattaacttattaaatacaatctatacacatgagagtataacgcatctcccatgttcaaattattaaaaatcacaaaaaagctcggcacttaaattgagtgccgagctttttttatcgaataacttattgtaaaccttgtctttcttggttattgttttcattatttttttcgtgtttttgtttccattctttttgagtcattacatcgtcaacttgcatgttaacttcaacaacatctaaaccagtaatatatttaacttgttcttttactaattcagttactttacggaagattttaggtgctgattcaccatattctaaaattacttttaagtctacagcagcttgtttttcaccaacttcaacagatacaccttgtgtaacgttgttgccacttgagaatgcattagtgaatgtatcagttaagccgcctttcatgtctaagatacctttaacttcacgtgcagcgataccagcaattttttcaacaacttcatcagagaaagttaatttatttttgaattgaggctcttgattttgttcttgttgtttttgacgctcttctctttctttttcgttaacaccagtttgattgtcgtatgcttgttttgctttattgttatctacagtcataatagattctcctttaacttattgtttttttatatttttttaattaaattctaaattgatgaattaactccatcgatttaaaaaattcataaaatcttgcttacggtcttttatatacccaatacccacaccaattaaacataaaacgatgataagtattgttttccaaaaacctaacgttaagaataatatcgcgattaatagaaacgctaggaaaccaacgattctccatttaaacacttttaaaaaattaatcacttgttgtgtagagtcttgtccgttttggttatgattgttagccatgatatacctcccttacaacactcgtggaccagaagttttctgatctctcacattaacttctaacttacgtactggcatttctgtgaaatattctacattctttttaatatccgcacgaattgcttcagttaaagattgaacttgaacattatttggtacgaaaaagtcagttttaatgtcgatataagatttattttttttgttatatagtttcgcaactacatttggttgtcttacttgatcatattttgcaaccgtatcgaatgccgtcttttcaacagctttacgagatacgtaaacatgaccatcatcgaagtctttgtataatccaggttttcgatgcgtaggtttgaagatactaaatactaatataagacctattaatatcaatagtgcagcaagtgaaataagtaatggttggaaccattcaaattgaaggaagtagtcttgatattcagttatacgtccatcttggatatacatgaataacaggaaccccacgattactactattaataagccaaggataaagtttttaagtcgtttcacccctaacgacacctccttagttaaagttaatttaaaaacatattaaatatgtacccatcagattttttcttaaacataataaattaataactataaatttatttttaatatataagatgaagtaccatttagtaatatattccctagttcatattaatgaaacctaatttttaattaattttcgtcaatatgttttgaagaacgatattctaaaatatctgggtcacgatgtttaattaaaaccttattactatttctcggtttctcctcactcaaagattttaaaagcgaccatatcatcgctataatgaccacggaaaatggtaacgcagcaatgattaataaattttgaatcgcttgagtaccacctgtgtaaatcatgatgattgcaaataatgccataatgataccccaactcactttgacaaatgacttcggattaatatcaccacttgaactcaacatacctaaaacataagttgccgaatccgctgatgtaacaaagaaaatcataataacaagtaaagtaattaagcttaatacaaaacctagcggataatattgtagcgttgcaaaagttgctgtttctgtcgcagctttagcaatatcggcaatatgattatcttgtaagtaaattgctgacgcgccgaataccgcaaagaatataaagcaaactaacgccgggacaaaaagtacacctagaataaattctttaatcgtacgtccttttgacacacgtgcaataaatatacctacaaatggtgcccaagatatccaccatgcccagtaaaagattgtccaattttgtaaccattggaatttttgaccgccagacggaatgcgtaaactcatactaaagaaatttgcaatataattacctagaccattcgtaaatgtatttaaaatgtaaagcgttggcccaacaataaaaagaccaataagtactacaaaagcaaataacatgttgatattactcaacgttttgatacctttatcgatacctgaccatgctgaccaagtaaataatatggttgcaatgacaatcaagattacttgcatcgtgaagttactcggtacattaaataaaaaatgtaaaccttcgtttatttgcaatgcaccgaaacctaatgttgcagcaacgcctgtgactgtagctatgactgccaatacatcaatggcaccacctaaagggccacgcattgctttttcacctaataaaggcgtcaatgtagcgctgactaagccaggatatcctttatgaaagctaaaatatgcaaacacaagggcgacaataccatagactgcccatgcatgaataccccaatggaaaaatgaaaactgcattgcatcattaattgcagattgcgtgccagctttatgaataggcgttaatttgaaggcatgactgattggttctgccgttgtccagaacacaagtcctattcccataccagcactaaataacatggcaaaccaagatggcaatgaaaattctgggtcttcaccttcttcacctaatgtaatgtttgcgtatcttgaaaataaaatatacacacagacaaataaaataactaaaacgagcaataaataataccaagaaaaatgcagcgcaataaatgtagtaatgttttgcgtgagtttttctaactgtttcggaaatatggcaccaaaagcaacaaatatcgtacaaatcactaacgatacccaaaacactagacttactgatttatttttcataaatacaaaccctttctgtgtaatggtaagttcatacccacaactgcaacattttaatcatttgtaattttatatagacacaattaataatgctttatcttttaaaaatgatatataaaccacactcaaattatttatcattgaacaacaaagtattttattgtatttaagtaatacctttctaatgcattattgaattgatacctgcaaagttgccatatttccctttagaatcaatagtcgctaaacacaaaaaataagtcgccctatacagtattttctgcataaggcgactttacttactaatctatatattaattactaatttcccaatcattgattgtttttccaacaattgatgtgcttgatataagttttcaggtgataaaccttcaaaaacttgtgtcgttgttggttggtaatgtcctgattctatatttttcgtaatatcttctaaatactcatgttgtttaatcatatcaggcgttcgatgaattggacgcgcaaacataaattcatgtgtaaatgttatactttttaattttaatgcatttaaatcttgatcttcattaaaagctacgatagttgtaatatgccctaacggttttatcagttcaatcatagtattgtaatacaagtctgtattataggtgcaaaatatataatctactaatggaatttctttttctttaaattgacgcactaaatcctctttatgattcaatacgatatctgcgcccatcttttcacaccactctgttgtttcttgtcgtgatgctgttgtaatgacagttaaaccataccgtttagcaatttgagtggcaatacttcctacacccccagcgccattaatgattaacatggatttacctacattttcagaaggattatgtgaaattttaaatgtatcaaaaaacgtttcatatgccgtaataccagttagcggtagactaaccgcttcattagcacttatgttgtgtggcgcttttgcaactatagcttctgacaccaattgatatgtcgcatttgatccttgtctatttggcgatccagcataaaatacaacgtcacccggactaaataatgtaacgtctggtccgatagcttcaacagtaccaatagcatcaaatccaagtacacgaggtacttgagtgacttccatttgtcgttgctttgtatctacaggatttacactaatgctatttactttgactaagatatcatcgttttctggcgttggctttctttgttcgtatactttaaataaatttccttcttccaatttaaagggcttttcaaatcctatcattttcatatcgtttcacctcatttatgaacttatttcttattatacaaaatagaagtcatgtgtgcttatatcgcagcatcatgactcctttttcatttgaatatataaataattacagacgacttttgtattacattttagacttatttctaccatgttactgaacaaatttgctttagataagaaagttattaaattttggtcaattaacaaaattggtttgtgaaaacgtatactttattattccgttactttaataacttgtttaccaaagttatcgccagtaaataaatttttaaatgcacgtggcgcattttcaaaaccatcttcaatagttacttgtgactgaattttaccttcttgaacccattttgcaagctgttcactagcttctttaaaatcatcagcgaattcacttactaagaagcctctcatcattacttgcttcttaataagcgtaccttgaatacgtggtccgatatctgcttcaggatgattatatgacgaaattgcgccacatactggtacacgtgcaaaacgatttaaatgcttaaatacttcatcgccaactgtaccaccaacattttcaaaataaacatcaataccatctggtactgcttgtgctaacgcttctgcaaaatcctctttcttataatcaataccagcgtcaaagcccagtgtctctgttaaataatttacttttttgtcgccacccgcaatacctactacacggcaacctttaatcttagcaatttgacctacaactgaacctacagcaccagatgcagctgaaaccacaacagtatcaccgtctttaggttgtccaatatcaagcaaaccatgatatgctgtttgtcctggcattcctaaaacacttaaatataaatcaagtggtacatctgtcgttggaactttagtaatttgatccgcttggacatgattaatgattcgccaaggcaacatacctacaacgacatctccttttttataatctgcgagtgtcgaatcaattacttttgcaacgacatggctaacaatcggtttaccaatttcaaaaggctgtacatacgaatctgccttagtcatacgtcctctcatatatggatccactgaaatatacagtgtttgtacaagtacaccatcgctctcaagtttaggcgtgtcaacatcttcaattttgaatgtatcctcttgaggcatgccttctggtattttattaaaaagtatttgtttattttgcatcattaatcacctttctttatttgaaacttttacttatttgttacctaagcgttaagtttgaattgtgtcttcgtgatgtctgtatgcaaatacattcttagttgttatattttgacttaagcactgattcattcatgtaacttcaaccacattatatttgctataaacataaattaaaaatgttacgacttagacattttatggaaactctaaaacaatagataatttttgaaaagctctaatattacaagcttttttgccccagaaaaactagcagttgctttattttttccataagaagtcgatcaactcattagcaacattttcattctcatgaagctgactatgctgtgcagactcaccttcatatttagattctcgataacttttcggactatttcccagtaaatattttaatgatttcgaagaactattagacactctgccgtctgattgtgtaccatctttcaaatctccataaatatttagcacttcgatacctttacctttataaatatcttttagcacgcgtaattgctgataaggttgattcattcgacttggtttaccatctttatcaactgtaatttcattgacatcttcattcatatttaaaacaccattaaatgtccctgcaatattcacttgtttgtttaactgtggcagtgacttgtcgttaccatatgtcatcatatattgtgcaaatgttaagttccccattgagtgaccgacaaagttgaatttatcgaaattgtattcagattgtaacttagtcagtacatttttaaaccacgcagcattcttatccaaatagccttgtctgttattttcaagttcaattttcacaataggattcactgcatctttacttagtttccctttaaatgtcactgcaccatcctttgaaacgtaagcagtgatgatatctttagttacccctcttttttctgcttgcttcaccataaatttttcagagttggcactaccaccaaatccatgtaagaacaatgttggaattggctttttaacaaattgctgttgttgtattttaaatgtttgtgcctgtcgttgactaaacaccaccgtaataatagagcctataataatagcgaccgctaacaatgtcgtaataattacaaaaattttcttcacacttttaactcccattcatgtcttttatataagtataaaggatgtgattaaaaatgtcctttagttgattttgaatacatcattaacttttaatatgactttggaaagttgtccgttaacgtttgttaattgattgcttatttaactttcaatcgtgtgtcacccattgattaatatataaatatgtatatgcatgtttaatttatctctttttataaataaagacctaccagcactcgactgataggccttttaatatctttaattatttaatttcttttgtttcggctaactctttgtaccaataagcacttttcttaggatagcgttcttgagtctcaaaatcgacatagaataaaccatatcgtttttcataaccatttgaccaagagaacacatccattaatgaccaaataaagtaacctttaacatttgcaccatctttaatagcatctgcaataacgtttaaatgttgtcttacataatcaatacgtgcatcatcatgaactgttttttcagattcaataaattcatctttatatcctaaaccattttcagtgatataaatcttatgatagttaggataatctttaacaacacgcatgatttgatcatataaaccttgaggatagatcatccagtcccagtctgtgcgaggtacgtcgacatcaaattcacgttgtccgacacctttaagttggtatttagaaccgcctttatcacctgtcgcattatgcgtgatttcagattctccatcgtaacctctcatccagtcactcatgtagtaattgatacctaagaagtcgtttaaatctttggctgcatctaaaatggcataatcttcatctgtaatgtttaatttaccgccattaacagataagatatgttgcacaccttccatcgtttcacgagaatacttacctaaatatgttgcatctaagatgaatttattatggatgatatcttctaattctgctgcacgaacatcttcaggatttgatggatcgaacggatattttgttggcaatgcgtgtacaacaccaatttctccttgatagccaccatctttaaataattttactgctctagcatgagccaccatcatgttatgatgtgattggaatactttttcaaaatcatatttaatacctggagggaatttacctactaaatattggccatcaccaattggtccaatttcattgaatgtagtccaatattttacttctgggaattctttaaaacaatattcagcataatctacaaagtagtcaatcgttttacgatttagaaaatcgccatctttatgtaacacttctggtgtatcaaaatgatgcaatgttacaaatggttcaacatgacgtttatgacattctgcaaataacttatggtaatactcaacacctttagggttaacttcgccatatccatttgggaagatacgagaccatgcaattgaaatacggataccattaacaccgaatttttcacttaattctaaatccactggatatctgttataaaaatcactcgctggttctgcagtgtaccaatagttttcttctaaatacgtatcccatgctacgcgacctttaccatccgtatttgtcgcaccttctgcttgatatgctgctgttgctccaccaaaaataaaatcttcaggtaatgttttagtcatatgaaaaactcctattcttaattttcaaattgttgttgaacgaaatcaagggctgcttggccatctcgtgtcaatttgatatattcagcaccttgagtcttcgctaatttaatacctaatctatctgtatcttgcttaatatcttcatagttagacgcaacttgtggcgctaaaatgattaattggtactctttcataatgtccatatgtgcgccatatccgccagctgccgctttcactggcacatgatattcttcagctgctttattaagtgcgttggctaataatccacttgtaccaccaccggcacaaagtactaagacatttgtttgttctgtgatatttgaagctttagctgcatcttctgatacaccacttgcagctaaaattgaatcagcttttttcgtatcaaagtttgctgcaactttttcttttaaatctgaattactttctttacgtccttcttcttcatcaagaatttcactatcataaacttttaggaatgggtagtaaataataatatctacaacaatcaaagtaatagctagtacgaatgaccataaaccaaaacctgtacccatgataatgcccaatggacctggtgttgtccaaggtaaattcacactaaaactattcattcctaacacttcaacgaaaagtttgaaaatccatacgttaacaattggtgctaatacaaatggaataaagaacacaggattcaatactagtggtgcaccaaataaaattggttcgtttacaccaaagaatgttggtacaactgatgcacgtccaatcgctttgtttcgtttagatttcgtcatccacataaacatgaacgggacaaccaatgttgcacccgtacccccaaatgtaacgataaacatttgtgtacctgatgtaataattttatctgcgtgttctccagcttgaagcaacttgaagttcgcttcgatattcgcatatgtaatggctgcaattgctggttctactattgatggaccatgaattcctacaaaccagaataatgcaaaggctccaaagataattgtgacaccaatccatccatctgctgctgtaaataatggttcgaataattttaaaataccttccgctacatttgatttaaagctgttgcgaatgactaaatctaatgcataaagaatgatgattaccgctgaaaatggaattaagtccttaaatacttgtgaaatattcggcggtacttctttcggcattttaattgtaatattgcgcttcacacagaagttataaacaataacagttacaaatgctgataagaatgctgttaataaacctttagttcccataaatgcacttaagaatccaccatctttggctggatcagaagctaagaacaagaatccacacatcgctgctagcattgtagaaataaagttaatttgatttgtactttctagcttacggttaaatgaatctgttaaagatttcgctgtcgttcctgctactaaaaatgctacaagccccatcgtatagttatatggtttcattaaaatggcttccatgcctttatcccatttaaaaccaaatatatttggcacgtatgcaattaatagaaagatacttgagaataagatgacaggcattgcagaaataaatccatcacggatggctcttaaatatatgttacgtgataatttctcgaaaaatggcttccctttttcaatttgtgctatcaatttttgcatcattgtcatcaccctcttttataaaattctaataaatgcttcattaaatctttcagtaaaattgttgtcattaaatggtcttgaccatgcatcatcgttacactgtatgcaatatcatcaccttgcgcttctttagccaacaggcttgtttgtgctctatgcgcttccgcaatgcaattgtttccttcttcaatcaatgcatctgcttttgcaaaatctccagcttgagctgctgttaatgcttctaaaaacttagaacgtgcatcccctgcaaatgcaacaatttcaaaacctaataattggacttcttctctattcatagcattaatccccttttaaacttattttctttgtttccaagatgtcgcagtatcttttaatactttatttaagtcatcaatatttttgaaaccagttgtacgtaaccattcacgagcagcatcttcaccttgttcaatgtatacttgaacagcaccagaccatgtagcacggccacaaagtaccccgttgaatttagcaccagcttcgtgagcaaattttaaagtttcttggaataattccgcagaaacaccagcacttaagtaaatgtatggtaaatgagttgctgcatcttgatctttaaagtgttgtgccgcttcctcttttgtataaaccacttcaccttcagcaaagccttctacatacttcatgtttactggtacttcaactttcaatacatcaacattaaagcgtggttctgagaataatttcattgcttcgttaacctttctaggcttaacttttgcgaattcaacactaccgttatcaggaatgttgtcatcgtatgttaatacttctaagaagaaaggaatgtcttctgcaacacattctgaaccgattctttcaatgtatgctttcttttgaatgttaatttcttcagcatcatcaacatcatagtaaagtaagaatttaacagcatttgcaccttgttcttttaaacgttttgcagaccactctactaaacagtcaggtaaacgacctttagcgtttacgtcatatccagttttttcataagcaagtaataatccacagtctttgttacgtgcatctgaagctggtaaaccatattcaggatctaataaaattgaagatgcatattgtgttaattcttccgcaactaatacttttaattgttcaatttgagctacagttggctcttcagtttgatgttttgccatcatgcgctttaaagcaccacgttgatcaaatgctaatgcagaaatgataccttcgttattacttaattgttcaattgatgcgattttttgattcgattttgacattttttacacctctaaaacttcaatttgtttgaataaatcatcataattatttaaattgacataacctgtttgtgcttcttgcgcattcagcatgcctaaagtattggctttttttagtaaatcgtggtcgttttcatgattaagaattgctgaagtaattccagcaaccgtagaatcacctgaaccaaccggatttaatacgcttattttcggaatattcactctatagaatgtatgattgtgcttagcgaacgcaccttgtgcacctaaagacacaataatccactcaatcccttcgaataagggttgtgacactgcctgtttcaaactttctaaactttcatcaagtggctggttaagcaactgatataattcagaaatgtttggtttaatgactgttggcttataagggttttctaatactgtttgcaaagttgcacccgagcagtctaatatcacaggcacacctttgttttggcatcgttcaatgatttgtgcataataatcttgatttaatccttttggtaagctacctgaaatagcaactgcttcaactttttctagtaattgctcaaaatgtttaataaatcctgcagcctcttgattatcaatctccggtccctgctctaaaatttctgtttgttgtccttcatgtaaaattgcaatgcagtttcgtgtttcacccttaatgttataaaatgcatgcttgatgccggcatgatctaattttttagcaataaattgacctaattcaccgccaataaaaccactcgcaaggactggctcacctacttgcgcaagtactcttgttacatttaaacctttaccaccagctgttttacttacttcttgaacacgattaacatcatctaatttcaatgctgttaatgggtatgaaatatcaacggatggatttaatgttaaagttaaaatcatatgtgtcgtcccttaatcgtggtattcgcctctgtcccatttttctaagaattcatcaaagaaatgtggatcagcttgatctgcattgcttgtttctaaatgtttaattttagcgattaattttttgttctcttcagttggtttatattcagcattaataaatgcatcgataatatcgcacattaataactcaccaataatacgtccaccaaagccaataacgttcgcatttaattcttctttagcatatagcgctgatgtcatatcacgtactagtgcagaacgaacgccaggtactttatttacagcattgttaataccaacacctgttccacaaatacaaacacctaagtctgcattaccgctaacaacttgttcgccaacttttttaccaaaaattggataatgtgttcttgtgaaatcgtatgttcctacgtcaatgacttcatgtccttttgattttaaaaattcagatacacgcatttttgtatctgtaacaatatggtcgcatcctaatgcaatcttcatagtaatttttcctccttagcacattttattaagcatatctacgcggatttggtgtctaccaccatcgtatttaccttcaacaaaacctttaacgacatttttcgctaatgtgtctccaacaatttcagatcccatagtgatcattcttgaattgttatggcctctagtcatatatccagagcgttcatctgatacttcagcagcaatcatgcctttgatttttgtagcaaccataaagctacctgcaccaaatgcatcgataacaatacctaagttaccttcttgactttgaacatcttttgctacagccaaagttgcatcaacaaagtcaacttcctgtccttctgttacgtcaacaacgtcatatttattgtctaataagtatgatttgatgacttcttttaatcgtttgccagcttcatctgaaccaataataatcgccataataagactcctttttactttaattttgaaatacctctcttaaaatgtgacatgtttatttgtaggttatgaaaatcttgagaaaaggctttcaatttgattacgtttaaattataaacataaacaaacaataaatcaacataatatgtttacaatctgtttgtttatgacatattttcaaacaataagtgaacattcaaattgtggtgttgttttaattaggtattcgtctgaaattgtagtaaaactttgtcggggttcccgtttacataaatttgcataaaaaatagcccataaatgaatgcaaattcacattcacttatgagcatatagacacatattttaacaatgcagttatatttttaatttagtcgactacttcaatatatgttttaatcgtttctactttttcttcatcttcataatccataaccactgcagttaattcgtttaactgacaaaatgatgtaaaatcttctttgccaactttcgtatgatcaattagcaagtatttttcaattgaattacttagtgccaattgttgcgtataggcttcatctaatgtagatgtcatcacagcacctttatttactgcgttactactaaagaacatcttgctaaatcttagtttttctaacatggcattcgccatttcacctacaaatgcttctgtcatatggcgcatttcaccaccaattaaataggcacgaaaatgtgctgtttgtttttccaacaaaattttatacaccggcaaacaattcgttataattgtgagcgtatgatgattgacttcttctgctaatagttccactgttgttcccggtccgaaaaacaaagtatccccatcttcaattaatgatgcagcttttctagctataaatcgtttttctgcaatttgacgagtatgtttttctttatgtgatatttctttatactgaaatgttgaattactgcgtgcaccaccatgaatcttcgttaaaatccctttattttccaattcaattaaatctcttcgaactgtcatatcagacacatttaaaccttcgacgatttcattcgttcttatcgtgccctttttattcactagtttagcaatttcgtccaaacgttcatgtttattcaatgtaaaattgcctcctttatttaggcgattgcgcattaccttttatgtttagacatcaattttaatatacatgcttattctataataaaaattgcgtaaaaactaatataatttaactgttcgattatatgtataattcatttttaaaaagaactgtttaaactgcgcctttgataatcgtaaaatgaatatactataataaaagcaaaagacgttataaatcattcattattttgatgaggtgtttagtttgaaaaatgatttagagacactaaaacatattatagatagttcgaatcatattacatttttcacaggtgctggtgtatctgtcgcaagtggtgttccagatttccgttcaatgggtggcttatttgatgaaatttcaaaagatgggctttcaccagaatacttgttaagccgtgattatttagaagatgatcctgaaggttttatcaatttctgccataagcgcttactatttgtcgatacgatgcccaatatcgttcatgattggattgcaaaattagaacgtaatcaacaatctttaggtgtcatcacgcaaaatatcgatggtttacactcagacgctggaagtcaacatgttgatgaattacatggcacgttaaatcgtttttattgtaatgcatgtcataaatcttatacgaagtcagatgtcattgatataactttgaaacattgtgataattgtggtggtgccattcgaccggacatcgtattatacggtgaaatgttagatcaacctaccatcatacgggcattaaataaaattgaacatgctgacacccttgttgtactaggttcatcactcgttgtacaacctgccgcaggattaatatcaaattttaaaggcgacaatttaattattatcaataaagatcgaacaccttatgataacgacgctactttggtcatacatgacgacatggtttccgttgtaaaatcattaatgacagagtaatcagtacgtaaaaagcatttcccgagtagtagggaaattctttttattttgtagttgcgtttttggaattcggagtttggttttcggaattcgacatttggaattcagaattataatgagtggaaaattttaattattgcgtgcaaaataccttggttttgtagcgattttcatttgatgaattgttttttgtttgaataggatgttgctgctttataacattttcaatcgctaaaggcccattcgtaaaaaattaactgtaaatcttatgcttacaactcattttattgtttacttttattgcgatttttcttactaaagatatttgtttcatcaatagattttttattactaaaatagactgtaaaaataatcgccattcctgcaaatattggtattttatgatattcaaatggtacaaagtacattgccgtgagcatgacgatgcctgtaattaaagtaataatggcaaaatgtttatatttcatgttattatcccctatacaatttattctacattcattatatacttcattttataaaattatcaataatataattattatcttagttaagttattgcatagtacaaaaattcataataacttatttgcttgctcctttcactttttaagagtaataaaataacctgaaacatagactttaacatccaagtttcaggttagtgtaatgtaaattatttactttgttatattatgattaaacatctaattctctgcttgtaagtgctttaatcatctctggatcagcatgtgagaaaaattggctattactttcttctaatgtcgcaatttgttgtttatcttcttctgtaagttcaaaatcaaatatatctaagttttgagccatacgttctggattcactgattttgcgagtacaacaatgtcacgttctactaaccagcgtaaaataacttgtgcaattgatttgttgtatttatctgcaatggcctgcaacaattgattttggaataattgatttttaccttctgcaaatggtgcccaagcttctaccacaacattttcttgttgaagtgctgcaacttgttcttcttgttgatggaatggattaatttctatttggttcacttgtggttgaatttgattgtgaatacctaaatctacaattcgatcaacgccgaagttagatacaccgattgctttaattttaccattttcttttaactcttctaatgcacgccatgagccatatacatcattataaggttggtgaataagcactagatcaagatagtccaaatttaatcgttgtaatgatcgttcgattgatttgatagtatcttcatagttaacattttcaatccatactttagtcgtaatgaatagttcacttctatcaatacctgaagcttcaataccttgacctacttcagtttcatttaaataactttgtgctgtatcaatatgtctataacccgctttaattgcttctttaaccgcttctgctgtttgttcttgaggaatttgaaatactccgaaacctaatactggtatctttacatctttacttatttcaatatgattcataaaatgaacctcctttttcttgtaagctcactataaaccatggagcaaactctatagcaaaccatagtattactttctctcccaaagacgttcaacattgtcatcatgattatcactagcattgattttagcaatatgattatcataattatcaattttatattgtagtaaatctctcgcatcatgaattgtctttaagttttcatttaattcttcgagttgcttatttaaaatttgcttttgctgtgtttgaatattttcatttttaggaagctgcgctaatctacaaaattcgataagcgattcaatactgacgcctgcatttcgcaaatttttcactaaataaatccaatttaaatcactatcattatatattctatatccattttcatctcgattaacaggtggaaccacaccaaccttttcataatatcttaaagtgtcttgagatatattcatgagcgctacgacttctttagttttcattgcgactatcctttcagttatgtttggtcgtctaaagtaatgttgctttatatattgccatcttcgtttgaatacttcttattttattactcaaatttaaatttgtctcttttttaacattttacatttcatcgtttttaattactttaaaaattgtataacttaaatatttaaaatgatataatcactaagattgataatatttaattttttaaaaattattttcgttgcaatttttgggtgatgcggaaaatttgggtgatcgattgtttatatgcatcaacattctttgtggattgtttgacagtagacagtcatttgcatacgttaacgaattttgaaaaattgaatcattatttaatcataatattcattgcgcacgcgcaacacaaaaaggagacatgtcaatgacatataaaatgaagaaatggcaaaaattatccaccattacgttattaatggccggtgtgattactttgaatggtggtgaattcagaagtattgataaacatcaaatcgctgtggctgatacgaatgttcaaacgccagattatgaaaagttgaggaacacatggttagatgttaactacggttatgataagtatgatgagagcaatccagatatgaagaaaaagtttgaggctacggagaaagaggcaaggaaattactaagtagcatgaaaactgaaagtgataggaaatacttgtgggaaagctcaaaagatttagatacgaagtctgcggatatgactcgtacctatcgtaatattgagaaaatcgcagaagcgatgaagcataaaaatactaagttgaatactccggataataaaaacaaagttaaagatgcccttgagtggctgcataaaaatgcctatggaaaagaaccggtgaaaaaacttgaagaactaaaaacaaatttctcaaaatcagcacctcaaaagaataccaatttaaattggtgggattatgaaattggaacacctagagcattaacaaatacccttatattgctgaatgatcaattttcaaatgaagaaaagaaaaaatacactgcccctattaaaactttcgccccagatagtgacaaaatattatcttctgtaggacaacctgaacaagctaaaggcggaaatttagtagacattgctaaagtaaaacttttagaaagtattatcgaagaagataaagatatgatgaaaaattcaatagattcatttaataaagtcttcacttacgttcaagattctgccactgataaagaacgtaatggattttataaagatggttcatatatcgaccataaagatgtcccatacactggtgcttatggcgttgtactcttagaggggatttctcaaatgatgccgatgataaaagaaacaccttttaatgataaaacccaatataatacaaccttaaaatcatggattgacgacggatttatgccactcatttataaaggtgaaatgatggatttatcacgaggtagagctatcagtcgtgaaaatgaaacgagtcatacagcgtcagcgactgtaatgaaatcattgttgagattgagtgataccatggatgattcaacaaaaactagatataaacaaatcgtcaagacttcagtagagtcagattcaagttataaacaaaccgattatttaaactcttattcagatataagcaaaatgaagtctttaatggaagacagcactatttctactaacggtttaacacaacaacttaaaatatataatgacatggatcgtgtcacctatcataacaaagacttagactttgcatttggtttaagtatgacgtcgaaaaacgtcgcacgttacgaaagcatcaacggagagaacttaaaaggttggcatactggtgctggaatgtcttatttatacaatagcgatgtgaaacactaccgtgataacttctgggcaacagctgatatgaaacgattagcaggtactacaactttagaaaatgaaatattaaaagatacggatgataaaaagtctagtaaaacttttgtatgtggaacaaaagctgatgaccaacatgctagtatcggaatggattttgaaaatcaggacaaaactttaactgccaaaaaatcatatttcatattaaacgataaaattgtcttcttaggaactggcattaaaagtactgattcatcaaagaatccagtgacaacgattgaaaatcgcaaagcgaatgggtatacgttatatacagacgatatacaaacatccgcttcaaatattaatgatcaggaaaccaattctgtctttttagagtcaaccaataaacctaaaaacaatataggctatcatttttttaacaaaccgaaaataactgtaacaaaagaaagtcatactggtaagtggaaagaaataaataaaagtcaaaaatcagaagacaaaaaagatgagtattatgaagtaactcaaaagcattctaatacagatgataaatatggatatgtgttgtatccaggaataacaaaagataattttaaatccaaagcaagccaagtaactgtcgttaaacaagatgatgacttccatgttgtgaaagataatgaatcggtttgggctggtgtcaattatagtgatagcgctaaaacttttgaaattaatggtactaaagtcgaagttaaagtcaaaggaatgtttattcttaaaaagaaagatgataaaacttatgaatgtagcttctataatcccgaatctacaaataccgcttcagatattgaatctaaaatttcaatgactggatactctattacaaataaaaatgcatcgactactaatgaatccggcgtatgctttgaattaactaaataagcaagaaaatctcggcactataccatttttatagtgtcgagattttataagtatcgccatcattcaccttgtaatccgcagaccacatcacccttgataagttctcgattatttataaatcgaattttcaaagacgtacatgcttcaatattcttatcattcattacttgaaaatgtatatgaggttcagtagaattgccagaattcccaaccttcccaatgatgtcaccatatttaacattttgcccctcattcacaatgattgaatattgttgtaaatgagctattaagctatactcattttctgcgtgcttgattacaatataatttcctaaaaactgtgattcattcatacttccaatactgttgtcttgaaccccattcactactttttcaactgtaccatttgctggcgcaatgatatcttttccaaaacaaaaataatcagtatttacttttccttgattcttatatgttttatgattttctttaataactaaatcaatagcatacctttgatgtgggtataaatagtgataattatataattcattatctccaccccaaaaaacctcatagcaatctgttgtcggcactgcgtattttaaagtcgtttcattcttaatcgcatcataattgattaacggacgcataacaaatccgataatactattatctttccatgtcactgccactccaaattgatttgctttatctatccatatttgctccatagtaccatcattttgagtacacacctttaattcatgtatatcagactgccttgtataagatttgaaaagtttcctaaactgccaataactaaactctcgcttcaaattttgatcaaaaatcttatatattttcctgctcttacttttatttaaataatccccaaagtttgttttattcatatatacttaacctcttatattaattttggtatcaattctttctccagttcctgcgtcatttttgcgctacctgaatcgtctacacttaattagacaaatcaacatataaataattttttaaaactaaagtgtagtcgattcactatattttctaatcatcccttaaatattaatatttgcacttaaaaagtatacatatcactcaaccaatcaataatcatacttaccttcaacaaattctttaacatgcagtgttatcccttgataatatggatattttgttaatctaaatttctgttttaatgcttcatctctactattcgacatcaaataggcatgttcaagatagcttaaatatgcttcgtcattgccgctatctccaaaacctaatattgattttacgggtatattatatttcttcatcagaaattgagtagcatataattttccagcatttgacggtgtaaagtcaatatcatacgcattttcaggatcaccagctaatggattgcttcgactaaatctcgctgtatagttttggtcatttgcgtatctgacaagtgcttctagaatacgcctatcattgttgtgattacctgttgaatgaaaataaaaattataatgtgtttcattaccttcaaatgctctttgtggaataaattcgacattatattgcgcagaaatatgacgtaatatatcctcaatatcttcaaataaaaatggttcgctcaagactttctttttatatgtttctgattcaacatattcgccattattccaagtgaacattttagaactcaaatcagaaaagatatgtaatggtttaaacgtcatattaacttgatccattttatccatgacactttgaaatgtacttcctgtcaatacagcagtgatcacttcattattattagttagtttttccaacaatttttccatttctcttaaatgatttaaatcttcttcatttgtattatgtttaaaatatgtttcatcaaaatcaaacaataatagacgctttgacatactcattcctccataatattttaatgaatttatctataacttaaatacactataagtctcaattaaaagtataagatcgactatatgcttttcatgcttattatatacaactaatgaatccctataaactaaaaacattgcttaccacttttcaaaatacacgggtcatatccctcgttaaaaactattactaaaaattaaaaatataaaaaaatcaaaaagtatgttttgaactttatgaaacgtgttatataaatagtgtaatataccacaactttaaaaggagattgagatatgaaactaaaatcatttgttactgccactttagcattgggattattatcaacggtcggagctgcattacctagtcacgaagcatctgcagatagtaataacggctataaggaattgacaatggatgggaaacacactgtaccttacacgatttcagtagatggtattactgcattacatcgaacttactttgtttttccagaaaataaaaaggtactttatcaagaaattgacagtaaagtaaaaaatgaattagcttctcaacgtggtgttacaacagaaaaaattaataatgcacaaacagcaaattatacacttactttgaatgatggtaataaaaaagtagtgaatctaaagaaaaatgacgacgctaaaaattcaattgatccaagtacaatcaaacaaatacaaattgtagttaaataataatttgaaaatgaaaatagttacacagggcaaacgctgaaaaattgcgtttgtctttttagttattgaacttgtaaattattgttgtttgcttctcctgataacagattggcctatacaattgtaaattcgatatgaatgtctaccataatttataatctaacataacagcaaattacaaatagctagaacacaaataaatcccctcactaccgttaatagtgaagggatttattttattacttagacgtatgctctatgacagacatgtttaaccgtattaatcaatcgtttatcattgctaaatttccaaatcgaacattatgaagtcaatgcttcaatttttataatccatcattacatttccgcattcattattcagcttctctaatttcgtctgcaatatctttatagtcaatatttgcatttatgaaatcttcatcttgaattggaaaatgctgttcaaatgtttctatattttggatttctaccttaacatcttttacttcaaaatctaagacatgtccgccaaagttacgatcatcatttgcaaagtgtacatggaatcctgctgacccgataccatggaatagttctggtgtaaagaaaccaacgactgcgcctttgacgtacgtttcagtttgttcaggttgtcttctagctgaatcaattaaacgtgtataaggtggctcttgtgccggcatcaaacgtacatgcatttttttaaataagcctgaaatttttactgcagaaaagaaattttcactcaacatcttttccttaatttctgcaaaaactgcttcagaagatttatctttcgtttcatagcttgtatctgctacgaatttagttacagttgcatatggtgttaactcatcaccttttaattccacaaattctttatgttcatttgcatgataggcttttccatctaaaaagatgacctcaccatttgaacctgttagtgtagcgatacctaaatcaccatgttgcaataattcatttattgatgcagttccttttaataaacctgccattaatgtgcctaatgtaccatgttgatataaaacactagccataaaatttcccactcctcattaacatttatctttgttttagttaaatacgtcaggtaacatatttgttgaaagtttgatattatctttataatttacaggtatatcaattaatactggaccatctgtttcatagccctctttaattgccgcttctaattctgcttgattagtaactcgtaaaccttttgcgccaaatgattcagcatattttacgaaatctacaggaccgaagtcgacacctgatgaacgtttatatttcatttcttcttggaattcaaccatgttatattttccatcgttccaaataagttgaataatgtttagatttttacgtacggccgtttctaaatcttgtgatgaaaataaaaagcctccatcgccagcaacggatacaacttgcgtattagggcgtacaagcgcagctgaaattgcccacggtaatgctacaccaagcgtttgcataccgttactaaataataaatgtcttggattgtaacttctgaaattacgtgccatccaaatatagtgactaccaacatcaactgtcactgttgtttcatcagttaataccttttgcatagattctataatttcaactgggtgtaagatgccttcttcatgcgtcgctttaataccagtttcttgatcaatatgcgctcttaactgttctaattcatctaaatgttgttgatttataaatggttcatctactttgtcagaaatcatttcaatcgttttagcaatattaccaatcaactcttttttcggttgcatataattagtaatttcagcttgaacttcgtcaatattgattatttgcgtatctaattctttattccagttactagcctcatattctataggatcataaccgattgtaacaactaaatcacttttacgtaataattcatcaccaacttgattacggaataaacccactcgcccaaagaaatgattttctaattcacgactaatcacaccagcaccttgaaatgtttctacaacgggtaaattggtacgctctactaatttgcgaatagcattcgtttcgtctgcacttgaacttctcattccagctagtaaaaccggaaatgatgcatttttaatcgcttcaatgacatcattaatatcctgttcacttggtactcctaaatttggtttttgacaaagtgatatcgccttagattcaactggtgaagaaatcacatcttgcggaatactaataaaacttgcgccattttttcctgaagtagcaattcgaattgcatttgtcataacttctgataatgattcaggatcttgtacttcttcactatattttgatgaatattttaataaagcagcattatcaatactttgatgcgttaatcgtaataaatcattacgtttcacttggccgcctaacgctaagacaggatccccttcagatgtagctgttaatagtccagtcgttaaattacttacaccagggccacttgtaacaagtactacacccggtttgcctgttaatcttccaataccttgcgccatcattgcggcgttttgttcatgacgagtgacaataagttcaggaccatcatcaattaaagcattaaatagatagtcaatctttgcacccggaataccaaaaacatattctaccccattatttttcaaagtatcaataaccatatcggctgcagtgtactttttatcagtcatttatattcatttcccttcaaatgtgatgtgtagatgtgtattacatgtaattgcattgtgatttgtaatctaatgatagttatgtaaaattaatgatgtttatcaaaactttacatatataattagatttgtaatacataaaaattgccttcagtacattatatatcctttgtaagatgaataaaaatcgttatttgtaatactaagtattccaaaaatgcatgagtagattttgtgcagtgtgattatgaagaatgtcggattgattaatgaggatgattgttactatgtctttgagtttggtatttagtcgatggcgggctgaaaatgctgttttatgtcggtttgaaaatgctgtttttggcgatttaaaattgtcatttcgataaaaagccacagcaagacttagatctaactgtgacttatacatttcatacttatatttatcgatagtttttatagttataaatgatagatgcagttcctaaacaaattaagaagataatcattaagtatatagaaaagttatctgttttaatataaaacctaaaaagtagaaacaccagcatcgcaacaataaaataaacaggaataaaagctttcttccaaaatatagaatctttcaattaagtcactccttattttgataacactctttaattaaggctcttgagttatcgtccggtcgttctttcccttgaatatctatgattagaacactatcgtgcgtttatcgtccagcctccgcaagctaaatgacaatttaataatgtacacttttgattgtgtaagcatgtacaaattatacgtgtaaatcaataattcatagttgaatttattctattcctgagacattaaataaaggaaaattcattatactctacacaatccatattccccacacaaacgtaaaaaaacacctcgacataacatcgaggtgttttgtatatttcgtccgacaattaacgttttgagaattgaggtgaacgacgagctgctttaaaatttggttttttacattcaaaaaactttagggtttcgtacaattgtatagactgtcgtaagccttgatactaaaggatttctaatttttccgattgcatagtattgcaccaaatatcactcaggggtaactaaagggtaactaaataaactgctgtccggtggtatatactctcgtatcgtccgattatcgtccggttatcgtccggtcgtaaatatattgatttatcaatgtttttatgtatatcaataggttatcgtccggttatcacttgatgaatttattagtctctaattaaataatatctagttcccggacctctaccttcagatccgataatctctaacttcttcagttcagcaattaactcagatgtataacttttttgaagtcccattgtttcttgaatttcaagtctacttgctaacttaccatctgatagaaattctacaatctctgtcaacttctgattagtaggtattttatttaacttgtaattcttattaaataatactactcgaaaatccccctctttactcgaaagctcacaaaacccttgatatcattggtttcccatgattttttaatgtttttcttttgagttactcgaaaattttcctctttactcgaaagctcacaaaacccttgatatcattggtttcccatgattttttaatatttttcttttaagttactcgaaaatttttctctttactcgaatccgagtaaataatatgttctctttggatcattcttacttgatccatgtgtcgatataatattcatttcctctaattctttcaatctttttctagcagtaggaacagacctttgaataatattagcaattttagatgctgttagttcgccttgattatataaatgtctcacaattaattcttgttgctcatttaaactttcaaataattcaggtgttattatattactcactctccctgtttctctttttttccttgctattatgttattcttcaaagctagttgtactgaactattattaggctctgagtatacaggatcatctaaaaaatattccttcatttcgtcaaatatacgtcccacgccctcatttgattctctcacccatttatattgagttaatgctgcagctaattttggattccttgaatatctttcttctttaatattctctaacgtaacagaagcaggcagtgcacccgggctactaatttctaatctgtcgtcaaacatttttattcttatatgatcgccttgattatcatatctgcgatgtacaatagaatttatcatcccctcaaaccaagcaaattctggatattctggcaaagttacaaatcttccctctttacctaaaaaagtatattcacgtaattgtgtattgataaaggctctcgcttctcttattgctactggcaaagctttatcaaaagtaatatcttttacaatgttaagtcttgtcccagattcttcttttgtaccttcatacctcataaatcgaattctagcgcctggtaaataaacattgatgttattactaaacaataacaaacctgcaactgtcaatttaccttcacgcataaatcctctagcttttaataatttttcattatctacgtttgtattaagtaattgcttaaattcatcaactagttcttcattcacatcttcaatactagaatactctactaattcttcttcgaatcttcgtgaaccacggtcgtattctagatttgtaatttgattgtgtgtcagttttctacttttatcgttaatccttaaatatactgaatcatcttttaaggtgattatggcatcataactgggttcaatgtcgaaaataagaatttcatccatagttccatcgcgtttcttcacttctattatttcatatgtatatttaggtattctatataaatgttcgaaaggtgcttcaatataaacctctttcttttttgcttttgaatgattaaatcccgaaatttctccattatcttcaataccaattaccagtttgccaccttcagcatttgcaaacgcactaatgtgttgagcaacatctttaggatttatagatgccctctttcgatctagaagctgtccttcaacctcagtttgcaaatattcaatatacttactactagtcatatataaacctcgcaatctcgcatcttattgactttattataacattcaatacgatatctatcgaatatcattacaacctctatctgcttgtcgtacgaatcccaaagaaaaacaaggtcatttcatatggtttcctatagtttcatatcattgaattttaagcagaattgaaacaaattagttactctaggggtaactaaatggtatctaaataactctataaaaatacaaaaaacactctttggaataatccaaagagtgttgtaaacgtttcttcagttgaacacaaattgctgccgcaatttgcgaactccatctgtaagcgaacaagttcgcaacagctgcagcttaacgttttgagaattgaggtgaacgacgagctgctttaagacctggttttttacgttctttcatacgtgggtcacgagtaagtaatccagcgcgttttaaagaacctctgtattcaggatctgcttctaataatgcacgagcgattccgtgacggatagcttgagcttgtccagtgaaaccaccaccatgtacgttaactaaaacatcatagttacctttagtttcagttacatcaaatggttggtttaagtctaaaattaatgattcgaatggtaagtattcgcgtacgtcacggttattaactgtgatgttaccttcacctggtactaaacgtacacgtgctactgagtttttacgacggcctgtgcctctatattcaacttgtgccaaagtcatttcctccttctaattaaccacgtaattcgtagttttctggttgttgtgcagcgtgtggatgttcagcgccaccatatacaaataattttttaccttgtttttcgcctaaacgagtgcttggtaacatacctttaattgagttttcaattaaacgttctgggttagttcttcttaattcaccagcagtgattgatttgataccacctgggtgatttgagtgacggtagtaaactttgtcagtttctttgttacccgtaaattcgatttttgatgcattaataacgattacataatcaccagtatcaacgtgtggtgtgtaagttactttatttttaccgcgtaagatagatgctacttctgatgataaacgacctaatgtttggccttcagcatcgataacataccatttgcgctcaatatttgattcatttgccataaatgtttgacgcataataattgtcctcctaaaaaataaatgcttctattcaagctataaacagtttcataacctaatagatgatttcatttgtttcattttaaaacgtttcatttcatttattttgttaactgttgttcgtttctgcttatatatcttgtaacacaataagtttccggggcttatcgtggggtggatataaaacaataccgttaataatcttataatttcacaagctttttgtcaatggcaatcagtcattttgtaatgattttttacgatgtattttgatatcgttaccaaagtcttttaataactcattttcatctaaataaattttctctaaatataatccttcagccgctgcagtgaaaggtacattcttacgattctttgattcaagaagttttggtacatctgatacttcgtgacgccctttcccaacttctattaaaaatgcaactaagacacgcaccatgttatataaaaatccagatccagtgactatataatcaaagccatcatctgtctttacaatttcactttggtataatgttctaaccttgctttctacttcagttttttgcgaacaaaatcccgtaaaatcatgtgtacctatgaattgttgtgccgctctgttcattttatctaaatccaacgtttcaggaataaatgttttcaaaccactttgaaatggattgcggtgttgtgcttgatatactttatatcgatagcgtttaccgacacaatcgtaacgacaatgaaaatcgtcatcgactgtaactacattattgacataaatatcatcaggtaacgttcggttcattgcatattgccattgtgacataggtatattcagctctgtgtcgaaatgaaagtattgctgtatcgcatgtacacctctatcagtcctacttgaaggatggattcttacatgtcttttatgcatgcgttgtaatagcttttcaaattgttgctgtaccgttcgaccattttgttgaatttgaaaacctagaaaattatttccttgatacgcaatttctactaatatacgcatgaatttacactcctgaatattttaatacgaataaaataattgcaattgggataatcatgattaaagataacgtatctctcaattgccatttaagctgtctgtagctcgttctcttaacattggcatcataacccctaacttccattgcgacggctaattcttcggcgcgttggaaagctgagatgaatagtggcactagtaatggaataaatgatttaatacgtgttgcaatgttccctgaacttatttcagaaccacgcgacttttgcgccaaaatgattttatctaactcatccattaacgtcgggatgaatcttaacgcaatggacattatcatacttaattgatgaactggtaatttaaacatctttagtggtgcaagtaatctttcaaacgcatctgttaaatcaattggacttgtagatagtgtcataattgttgctatcatcacaatcccaattaaacgcagtgatatatatagcccttctaaaataccattagtttcaatcgtgataccatgccactcaactaatacatatccacctttagttaaaaatatatgcatcattaatgtgaagattaaaaagaaaaatattggcgttaaacctttgattaggaaccataattgaatttttgctaatctcataaagaataagataagtgcaaacacccaaagatatgttaatggtgaatgacagaaaaatattaatataataaaaagaaaaacaaacattaactttgctcttggatcaagatgatgaacaaaagaattaattggtaaatatcgccctataatcaatttatttttcatgttgccactccttatacaagcttacaaatgcttcttcagttaaggcaatatcttttaattttgtttgatatttttgttcaaagtcatattgtaactgaacaatttctggcaaaccaatatgccaatccgccaatttttctttatctttgaagagctcttttggtgatgtttgcgacactaaactaccttctttcataacgatgacttcatctgcataacgcgcgacttcattcatatcatgtgaaattaggataattgtcttattttcatctgtttgtagtgacttgagtaatcgcattacttgtcgtttactttgtggatcaagtcctgctgtaggttcatcaaccacgataatatcaggattcattgccaatatcgatacaatcgctattttacgcatttgtccacctgacatttgaaatggtgattgtgacattacatctcttgaaaagcctaaatccatcaacagacgatgggcatagtttttggcttcatctaaattcattttaaagtttttaggtccaaatatcatttcacgctctactgtgtcctcaaataattgagattcgggaaattgaaataccattccaattctttttcttacaggtctaatatatttatctttggtcttatgtgtaatagtaatgtcatcaactgtaactgtcccagtagttggctttaacagtgcattaatattttgtatcaatgttgatttaccactacccgtttgtccaacgatggcgtaatatttaccttgttcaaattctgtattaacatcatgaatagcttgatgctggtatggtgtccctttttgataggtataacttacattgtcaaagcgtatagtcatagttgatccaccagcccttcataagttaagaatgatgtttggtgtcccagcatttgatttattttgattgggaatggcaaatctagacctattgttgttaactcttctgcatggtcaaaaatttcaatcgctgtgccttctttatagacagtccctttattcataacgataagatgatctgcttccatcgcctcagataaatcatgcgtaatagaaatgattgtaatattatgttctgatttaacttttctcactaaatccaataaattttgacgtgcatcaggatctaacatagaagtcgcctcatctaatataatgacagaggggttaagtgctaatacacttgctatagccacacgctgcttctgtcccccagataatgcattaggttcataatctgcacgttctaacatatcaacttgtttaagtgcttcgctgactcttctatgcatttcgtcatgtggaaccgcatgattttcgagtccaaatgccacatcgtattttacaattgaaccaacaaattgattatccggattctgaaatacaattcctatgtcttttcttaacttttcaaaattatcatctgttatagcttgattattataaaaaatttctccagatttaactttctctatgccaataattagcttggcaattgtagatttcccagaaccgttatgaccaacaatagatgtccactgacctttaggtatattaaaagaaacatctttcaatgtgaaggatgcatcactttgatattgaaatgaaacatttttaaatacaataactgaattcttatcctccacttgtctctctcctttacgattcgtgtatctatcatattttacaatatttataaatcgctgtatatgacattgactgggtttgctatatattactagtattttctgactcatttctagtctttaaagtgttgtttaacaactaatgataagaacatttattcctctctaacaattatgtataaacgttaataaaataaatgatttactagtataggggtggccgcgtttgattcaacgataatactttcacttcattcagttctagtgaaattgatcaaactagcttgatcatatttttagattcgcactcaaaaaagtagatataaagaaatcggacttaaaaacatttctgttcataagtccgatatcttattcaataaaaaagcgcgcaccccatcataagtttgttgagttcacgctttaaatctttatttagttgatggggtactctgagctagacaatatttgtatgtggcaaacattatcgttgcactcatttgctttatataaaagtagttagtgtatttatataaattcttatactaattcgataattactgattcagcaccgtcaccgcgacgagggccttgtttaaggatacgagtgtaaccaccttgacgttctgtgtaacgctctgcgatttcaccaaataatttttgaagtgcagtttgtgtagtttcatcttcgtttaagatttcaacattacgtaaagttttagctgcattacgacgagaagctaaatctccttttttacctaaagtgattaatttctcaacaacactgcgaacttcttttgcacgagcttctgtagtttcaatacgttcactaataataagtgatgtagctaagtcacgtaacatagctttacgttgatcagaagtacgacctaattttctgtaacccatgagttaacctcctttatcaatcttcttttcttaatcctaatcctaaatcttctaatttgtatttaacttcttctaaagatttacgacctaaattacgcactttcatcatgtcagcttcagatttgtcagctaactcttgaacagaattgattcctgcgcgttttaagcagttatatgaacgtacagataagtctaattcttcaatagacatttctaatactttttctttttgatcttcttctttttcaatcatgatttcagcgttttgcgcttcatcagtaagaccaacgaagatattcaagtgttcagtcattatttttgctgctaatgaaactgattcttgtggtgtgattgaaccattagtccaaacatccaatgttaatttatcaaaatcactgctttgacctacacgtgtattttcaacagtatagttcacacgttcaacaggtgaatacaatgaatcaacagggattacaccaattggtaaatcactagtattattttgttctgctaatgcgtaacctctacccttgttagcaactagacgaatttttaagtgaccacctttagatactgttgcaattttaagctctgggtttaaaatttcaacatcactgtcatgtgtaatgtcgcttgctgttacttcgccttcatcacgtacatcaatttctaaagttttatcttcttcagagtaaattttcaatgctaattgtttaatgttcataataattgtagaaacatcttcaactacattgtctactgctgagaattcatgtaaaactccctcaatttcaatatacttaacggctgcacctggtaatgaagatagtaggatacgacgtaaggagtttcctagtgtagtaccgtagccacgttctagtggttcaacaacgaacttaccgaatttagcatcttcactaatttcaattgtctcaattctaggtttttcgatttctatcatttaaatatcctccttatatacgtcgacttaatttaaaatgtttgctcagtgacctgtaacaataccatcataaattatacacgacgacgttttggtggacgacaaccgttatgaggtactggagtaacgtctctgatcgcagttacttctaaacctgcagattgtaatgcacgaatagctgattcacgacctggaccaggtcctttaactgttacttcaactgtttttaaaccatgctccatagctgatttagatgcagtttcagaagccatttgtgctgcaaatggtgttgattttttagatcctttgaatcctaatgcaccagctgatgaccatgataaagcattaccgaactcatcagtgatagttacaatagtgttgttgaatgttgaacggatgtgtgctacaccattttcaatattctttttcactctacgtttacgagatacttgtttacgtgccatttaaaatttgcctcctttacctattattttttcttgttagctaccgttttaactggtcctttacgagtacgcgcgttgttttttgttttttgaccacgaactggtaaaccacgacggtgacggataccacggtatgatgaaatttccattaaacgtttgatatttaagttagtttcacgacgtaagtcaccttcgactttataaccgtctacaacttcacggatgcgacctaattcgtcatcagttaaatctttcacacgagtatcagctgatacgttagcttcttcaagaattttttgagcagttgacgtaccgataccgtatatataagttaatgagataactacgcgtttttcacgtggaatatctactcctgcaatacgtgccatattaatttacacctctcttttattaaccttgtctttgtttgtgttttggattttcacaaattaccattactttacctttacgtttaatgactttacatttttcgcaaataggttttactgatggtcttactttcatttttatacctccctatattatggagtgacgattatttataacgataagtaattcttccgcgtgttaaatcgtacggagacatctcaacagttactttgtcgccaggtagaatacgaatgtaattcattctgattttaccacttacgtgagctaaaatctcatgaccattttctaattctactttaaacattgcgttcggtaaagtatctaatacagtaccttctaattcaattacatcttgtttagccattgattaacttccccctttttgcaatagtaaggtaatcgtcaatagacaactttattgttacgaatctatcagtgattaattttataagttaaacaaaaattacgggaattaattatcgttaattgccactctcatctatctaatatgattaaatcatgcctcacttaaaatagaccgctaaaagttgatctattacaaatgatctaaaatatcaatgacatctttggtaacgtcgctaatatcttttgaaccatcaatatttttcaatacacctttttgatcatagaaatctaaaataggtttagattgtttaatattaacactcaaacgattagctaccgtttcaggattatcatcttctcgttgatacaatttaccaccatcgatatcacaaataccttcgaccttcggaggattaaatacaagatgatacgttgtaccacatgactcacagattcgacgacctgtaagacggttcattaattcttcttccggaacttcgatattgatgacagcatcaatgtttctgtcaagctcagacataatattatttaatgcctcagcttgctcgattgttcttgggaagccatctaataaaaagcctttttttgcatcgtcttcagaaattctttccttaacgatacctacagtcacttcatcaggaactaattcgccacggtccatataagacttagcttctttacctaattcagtttcttcttttatagcttttctgaacatgtcaccagttgaaatgtggggtattgggaatttcttgacaatttcacttgcttgagttcctttacctgcgccaggtaaacccatcaaaatgatattcataagtgccctcctaaaattatctaccaccaaagcctttatattctttttgagatacttgagcttctaaagatttcattgtttcaatcgctacaccaataacgataagtaaacttgtaccaccaatctgaattgattgtggtaatcccataaacttagttgctaatatcggtagaattgaaataacggctaagaagatagaacctacaaaagttaaacgatataaaactttagtaatatattttttggtttgttcaccaggtctaatacctggaacatagctaccttgtttcttaaggttatcagccattttttccggattaacttgtacaaatgcatagaagtatgtgaatagtataattagtacaatatatacaaccataccaacattacttgaaggatttgcagcattcgcaatgttttgtgcccattctttatctggatagaacaacgttaatgttctaggcagtaagaagaacgccattgcaaagattacaggaataacaccggctgagttcacttttaaaggtagataagttgcctgtgaacctaatctttgagcagtttgtttcttagcatattgaatcggaattttacgaacggcttcaagtacataaatagcacctacagttaatagtatcagtgacactaaaagtcctaatactttcaaccatgctaatgatgtatcttcttgcccaacgaacgcagtttgtccaaattgaattagactggctggcaacgttgataaaatacccgcaaatatgataatagaaataccattaccaacaccgaactgagtgatttgatcaccaagccatattaagaaagcagttcctgctgtcaaaactagtgctattaataaataactcataattgactgattgataatcagcgcacctttgagataattattaaattggaatgccatacctatagattggataaatgctaaagaaattgctaaataacgagtaacgttatttaactttcttctacctacttcaccttgttttgcccattctgagaatttagggacaatatccatttgtaataattgcattacgattgatgcagtgatgtagggtacaatacccattgcaaaaatagaaaatcgtttcaaggctccgccaccaaaagtatttaataactcagtggcaccttgagaaccttggggattatcaaaagctgcaggattaactcctggagctggtatataagtccctattttaaaaattactaacattgctagtgtgaagaaaatcttgttacgaacctcttttgttctaaagaagttcacaagggtttgaatcattagatcacctcgtgtgctccacctttagcatcaatagcttctgctgctgaagctgagaatttatgagctttcactgtcaatttcttatcaagtgaaccattacctagtattttgataccagatttttcattcttaacaacaccagattctactaataaagctggagttacttcagtaccatcttcaaatttattaagttggtctaagttaacaatagcatattctttacgatttatgttagtaaaaccacgttttggtaaacgacggaataatggtaattgaccaccttcgaatcctggtcttacaccaccgcctgaacgagctttttgacctttgtgtccgcgaccacttgttttaccgttacctgtcgcaacaccacgtccaacacgattgcgttctttacgtgaaccttctgccggttttaactcatgtaatttcatttcggcacctccttgattatttttcttctactgttactaagtgcttaactttgttgatttgcccacgaatagcagggttatcttcaacaactactgaactgttagtctttttaagacctaaagcttcaacagttttacgttgtgtttcaggacgaccaataacactacgagtgagggtaatttgtaatttagccataactagttttccctccttaattgtataattcttctactgttttgccacgtaatttcgcaacatcttcagcatttttaaggttttgtaaaccatcgattgtagcacgaaccatgttgattggtgtgtttgatcctaatgatttacttaagatatcagtgatacctgctaattcaagtacggcacgaacaggaccaccagcgataactcctgtaccaggtgcagccggtttcataaatacgcttcctgaaccgtaacggccagtaattgtgtgtggagttgtaccttcaacacgtggaacaactactaaatcttttttagctgcttcaacagcttttttgattgcttctggtacctcttgagctttaccagtaccgaaacctacacgaccatttttgtctccaactacaactaatgcagtgaaacggaaacgacgaccaccttttacaacttttgctacacggttgattgtaacaacgcgttcttcaaattctttcgtctcttcttctctacgagccatgtatttgtccctcctttaaattaaaattctaatccgctttctcttgctgcttcagctaatgctttaacacgtccgtgatataaatatcctccacggtcaaatacgatttctttaatgcctttgtcagcagcttttttagcaattgcttcaccgactttagttgctaattcaactttagttgctgtagtagcaatgtcgctgtcttttgaagaagcttgagctaatgttacgcctttattatcatcaataatttgagcgtagatatgcttgtttgaacgatatacgtttaaacgtggcttttcagctgtacctgataagttagtacgaacacgagcatgtctttttaaacgcactttatttttatcaattttactgatcatttcaatactcctttctttagagtttatctattatttaccagttttaccttctttacggcgaacgtattcaccttggtaacgaatacctttacctttgtaaggctctggaggtcttactgaacggatgttagatgctaatgctccaacttgttcttttgaaataccttcaactttaacgactgtgtttttctcaactgagaaagtaatgttttcttcagctttaatttctactgggtgagaataaccaacgttaaggattaagtctttaccttgcatttgagcacggtaacctacaccaacaagttcaagtacttttacgtatccttgagaaacaccttgtaccatattgtttaataaagcacgagttgtaccatggtttgttctatcttctttagaatcagatggtcttacaacttcaattgtgttttcttcttgtttgaatgtcattctttcatttaaagttcttgataattcacctttaggacctttaacagttacatgatttccatcaaaagttactgttacgtcactagggatgtcaataattttcttaccaacacgactcatgttatggcacctccttattttttattaccaaacgtatgcgataatttctccgccaacattacgttttcttgcttctttgtcagtgattacaccttcagaagttgatactaatgcaatacctaaaccatttaatactttaggcatttcgctagcttttgcataaacacgtaaacctggttttgaaatacgttttaatcctgtgataacacgctcatcgttttgaccatattttaagaataaacgaagtacaccttgtttatcatcttctacgtattcaacatttttaatgaaaccttcactctttaagatttcagcaatttcttttttaatatttgatgcaggtaattctaacttctcgtgacgcaccatgtttgcgtttcttacacgagtaagcatatctgcgattggatctgtcattgtcattgattgttgcctcctttcagactcttttttattaccagctagctttacgaacgccagggatttggcctttgtaagctaattcacggaaacaaatacggcataatttaaatttacgatatacagaatgtggacggccacaacgttcacaacgagtgtattcacgaactgcatatttttgttttttttgttgcttagcaaccattgaagttttagccacttaattagcctcctttaaataattatttacggaatggcataccgaagttagctaacaattcacgagcttcttcatcagtgttagcagtcgttacgataacaatatccattcctctaactttacttactttatcatagtcgatttctgggaaaattaattgttctttaacacctaaagtgtagttaccgcgtccgtcaaatgcttttttagaaacaccttggaagtcacgtacacgtggtaatgatactgaaattaatttgtctaagaattcatacattctttcaccgcgaagtgttactttcgcaccgattggcataccttcacgtaaacggaaagtcgcgattgattttttagctttagttactaatggtttttgaccagtgatcaattctaattcttcaacagcattgtctaatactttagaattttgtactgcgtcacctacacccatgttcacaacgattttatctatttttggtacttccattactgaactataattgaattttttcattaagttttcagtaacttcagtgttaaacttttcttttaaacggttcaaagtgggatcctcctttcaacttgttattaattattagatttaatttcttcgccagattttttagcgatacgaacttttttaccatcaacaaatttgtaacctacacgagttggttcgtttgttttagggtccaataattgtacattagaaacatggattgctgcctctgtttctaagattccaccttcaggatttaattgagttggtttttggtgttttttcataatgttaacaccttccacaacgacacggtcttttttaggtagagtagcgattactttaccttctttacctttgtctttacctgcgataactttaacgttgtcaccttttttgatatgcatgtgggcacctccttatttgtattggttgttattaattaaagtacttctggtgctaatgatacgattttcatgaagttaccttcacgtaattcacgagcaacaggtccgaagatacgagtaccacgtgggcctttgtcatcacggatgataacacatgcattttcatcaaatttgatatatgaaccgtcattacgacgaacacctgacttagtacgtacgattacagctttgacaacgtcaccttttttaacaacgccacctggtgttgcatttttaacagtacatacgataacatcgccgatgttagctgttttacgaccagatccacctaatactttgattgtaagaacttcacgagcaccagagttgtctgctactttcaagcgtgtttcttgttggatcattagttaaacctcccttatctctaaacttgtattaaataattactgactcttcaacaatctctactaaacgaaaacgttttgttgctgataaaggacgagtttcttgaattttaacaatgtctcctaatttagctgaattgttttcatcatgagttttgtattttttagagtattttactcgtttaccgtataatttgtgtgttttgtaagtttcaacaagtactgtaatagtcttgtccattttgtctgaaacaactttacctacataaactttacgatcgtttctttcgctcacttttgtaacctcctcttacttaattattgattagccttactttgttcaatttctctttcacgagcaacagtttttagacgtgcaatcgtttttcttactgtacgaatacgtgcagtttcttctaattgacctgtagctaactgaaagcgtaggttaaaaagctcttcttttgaagatttgatttgttcttcgatttctgaagtggttaagtctctaatttccttagctttcatttgtttcaccacccaattcctcacgttttacaaacttagtttttactggaagtttgtgacttgctaaacgtagtgcttcacgcgcaacttcttcagaaacgccagcaacttcgaataaaattctacctggtttaacaactgcgatccagccttcaaccgcacctttaccagcacccatacgtacttctaaaggttttttagtatatggtgtatgtgggaagattttaatccaaactttcccgccacgtttcatgtaacgtgtcattgctatacgagcagattcgatttgacgagatgtgatccaagacgttgttgtagcttgtaaaccaaactcaccaaatgttacgtagttaccgcctttagaacgaccagttgttttaggacgatgttgacgacgatattttacacgttttggtagtaacattattattttcctcctccactagtgttcttagtaggaagaacttctccacgatagatccatactttaacgcctaatttaccgtaagtagtgtcagcttcagcgtgtgcataatcgatgtcagcacgtaacgtatgaagtggaacagttccttctgaatattgttcagcacgagcgatgtcagctccgcctaaacgaccagatacttgagttttgatacctttagcaccaagtttcatagctctagtgattgcttgtttttgtacacgacggaatgaagcacggttttctaattgacgtgcgatgttttcagctactaaacgagcgtcaagatcaacttttttgatttcaattacgttgatgtgtacttttttatcagttaacgcatttaatttgttgcgtaatttttcgatttctgaaccgcctttaccaattaccataccaggcttaccagtatgaattgcaatgttgatacggtttgcagcacgttcaatctctacgtgagaaactgatgcttcttttaattcattatcaataaatttacggatttttaaatcttcgtgtaaaagtgaagcgaagtctttttcagcataccatttagcttcccaatcacggataataccaacacgaagtccgattggattaattttttgacccacagtattccctccttaaaagttaattaagcttcttctttaccgtcacttacgacgattgtaatgtggcttgtacgtttgttaatcgcacttgcacgaccttgcgcacgtggacggaaacgttttaatgttggtccttcgttagcatatgcttctttaactactaattcatctgtgttcatgtcatagttatgttcagcattagctaaagcggacattaatactttttcaattactggtgatgaagctttgtttgttaattttaaaattgcaatagcttcagcagcatttttacctctgattaagtcaagaactagtcttactttacgaggtgcgattcttattgttctagcaaccgcttttgcttccattaggatgtcctcctctacttaatagatattatcttcttgttttcttgtcgtctgcaacgtgtcctttgaatgtacgagtaggagcaaactcacctaatttatgacctaccatatcttcagttacatatacaggtacgtgtttacgtccgtcgtatactgcaaaagtatgtccgatgaaattagggaaaattgtagaacgacgtgaccatgttttgattacttgtttcttttcgcttccttcttgagcttcaacttttttcattaaatgctcatcgacgaaaggtccttttttaatactacgagccatttgggcgcctcccttcttattatgtgcgtgcagctttaagccgcacacccaaataagttgattatattattttttcttacgtccacgaacgataagtttgtctgatgattttttaccacgacgagttttcttaccaagcgtaggtttaccccatggtgacattggagatggtctaccgataggagcacgaccttcaccaccaccgtgtgggtgatcgttagggttcattacagaaccacgaactgttggacggatacctttccatcttgaacgtccggctttaccaacgttaactaattcgtgttgtaggttaccaacttgaccgattgtagcacggcaagtagataagatcatacgaacttcaccagatcttaatctgattaatacgtatttaccttctttaccaagtacttgagcacttgcaccagctgaacgagcgatttgtccacctttaccaggtttaagctcgatgttgtgtactactgtaccaactggaatgttttgtaatggtaatgcgttaccaactttgatgtcagcttcagcaccactttcaacgatttgacctacttctaatcctttaggagcaatgatatatcgtttttcaccgtctgcatatacaactaaagcgatgtttgctgaacggtttggatcatattgaatagaatcaacttttgcattgataccatctttgttacgtttgaaatcgataacacggtattgacgtttgtgtccaccaccatggtgtcttacagtcaatttaccttggttgttacgtcccgcttttttcggtagcggttttaataatgacttttcaggtgtagttttcgtgatttctgcgaaatctaacgaagtcatattacgacgaccatttgttattggcttatactttttaatagccattgtcgcttacctccttaatggtaattggtttattagttaaataagtcgattgatccttctttaagagttacaatcgcttttcttcttttgtttgtatagccttggtaacggcccatacgttttttcttaggtttgtaattcatgatattaacacttgcaacttttacgttgaagatttcttcaactgccattttcacttgtgttttattaacacgagtatcaacgtcgaaagtgtatttgtcttcagccattgcttcagaagatttctcagtgattacggggcgcttaagaatatctcttgcttccattatccgagcacctcctcaacttttttagcagcagcttcagtaattactaagctgtcagcattagtgatatctaaaacatttaaaccttgagcagttgtcacttgaacgccagggatgttgcgtgctgataattcaacatttacatcttcgttttcagtaactactaatacttttttaggttgttctaatgtagataatacatttttgaattctttagtttttggagcttcgaagttgaatgcgtcaactacagttaagccattctcttgagctttgaaagataatgctgagcgtaaagctaaacgacgcattttcttaggcattttgtatgcataacttcttggagttggtccgaatacgataccaccgccacgccattgtggagcacggattgtaccttgacgagcacgacctgttcctttttgcttccatggtttacgtccgccaccgcttactgctgaacgattcttaacagcatgcgtaccttgacgtaatgaagcacgttgtaaattaatagcttcgaataaaacgctattatttggctcaataccgaatactgcatcgcttaattcgattgaacctgatttagttccgtctaattttaaaacatcataattagccattatgcatttcctcctttcacttcttattatttattaccttttttaattgaagttctgatttctactaaaccttttttaggtccaggtacgttaccttttactaagataactttgttttctgtgtcaacttgaactacttctaagttttgaacagttacagtgtttccacccatacgtcctggcattttttggcctttaaatactctagaagcatctgaagccatacctacagaacctggtgctctgtggaaatgagaaccgtgtgacataggtccacgagattgtccgtggcgtttaattgcaccttggaaacctttaccttttgatacgcctgttacgtcaataacgtcgccagctacaaaagtatctactgagacttcttgacctacttcgtaagcatccacgtctacattgcggaattcacgaatgaagcgcttaggtgctgcgtcagcttttttagcgtgaccttcagctggtttattagcatatttattagattttgcatcttttttgtatgcttttttgtcttcaaatccaacttggattgcgttgtatccatcaacttctacagttttcttttgtaatacaacattttctttagcttctactactgttacagggattaattcaccgttttctccgaatacttgtgtcatcccaatttttcttcctaagattcctttggtcatcgaaagtccacctcctaaaattgtctattataatttgatttcgatgtctacaccagatggtaagtttaagcccattaaagcgtcaactgtttttggtgttgggtttacaatatcgattaaacgtttatgtgtacgttgttcgaattgttcacgtgaatctttatacttatgcacggcacggatgattgtgtatactgatttctcagttggtaacggaattggtccagaaacatctgcaccagaacgtttcgctgtttctacaatcttctctgctgattgatcaatcacgcggtgatcataagcttttaatctgattctgattttttgttttgccataattttccctccttattcgtctacatttagtgatagacttctccacgaaaactatcttacacagcgccatggcaaagcggccgggtgtgtcagtaacctttcgcttcatcgcttttcttaaagtccaacgttagttatattacacgaaaaacatcgataaatcaaggcttttcacataatttttctatctgtctaacacatacttttatattttactttatatacttagtcagttcaactattttcgagatattttttatttccttctttattgtaaattcgtaccttgaatcattttattattatcattgaaaattattctatataattagtcataagaacggtggtgaatgaatatgaaaaatggaccaaaattatctttagctcttataggtatctttttaatactttgtgagtttttctatggcattccttttttaggtgcaacgtttattttaagttttggatggcagcctttactctttaatgcattactttatctaattcttactattatattattagtgaatagacaaaatgcgattagacctatagcgattattccaatatttggtatagtaggtagttttttagctattatccccttcttaggaattttgattcattggattttatttttcctaatgattctatttgtcctagttgtattatcagcgccaacctatatacctaataaaaatgctcgtgtcatttacacacaatacaaagatggacatagagaataattcttaaaacctttttaattaggtgtatattatatagaagaaacacgttcaacaattttaaaagaagtatatttatatcggatatttaaagacattcatagtattgctttatgttatttcgcttcttattttatccttacttcaaagaaaaaaacgactaccaatcattggcagtcgtttttttgtgtctggatttaaccatgaacaaatatgaagtacagaatgaatagtaccattaatacatacattatcggatgtacttctttatgttttttagagataagcattgtaattggatagaaaataaatccacacgcaataccagttgcaattgaatatgataaaggcatcataatgattgtaataaatgctggcactgcaacttcaaaacttttccagtttatctcagcaaagtttgcagccattaatacacctaccaccactaaagctggtgttgtaactgcacttgttacaacagcgattaacggactaaagaatagcgctaataggaaacaacaacctgttacgatactagcaaatcctgttctagcacctacagcaacacctgaagttgattcgatataagaagttgttgtagttgttccaaaaactgaccctacaatcgtagctaaagaatctgagaacaatgctctaccagctcttggtaatttattatctttcataatacctgcttgagtagcaacggctactaatgtaccagctgtatcaaagaaatcaataaataagaacgttaaaataacaattaagaactgtatcgttaataattgacttgggtctttaaacgcttcaaatgcagcaccgaacgttggttcaatacttggaatcttacctacaataccagatggcatttgaatcaatccagtgaacataccaacgattgctgtgatgatcataccgataaagatagaacccggcaatttaattgcatataaaataactgtaataacgataccgaatatcgctaaaagtactggtggatcagttaaatgtcccaatgttactaatgtagattcatttttaactataatacccgaactttgtaaacctacaaatgtaataaataatcctatacctgctgaaacagccatcttcatttgataaggaattgcattaataataacttccctaaaccctgtgacggttaatatcgcaaagaatatacctgagaataaaacacctgttaaaccaacttgccaaggaatacccatggttaacacaacagtaaatgcaaagaatgcatttaatcccatacctggtgctaacgcaattggatatttagctattagccccatgaatagcgagcctacaaatgctgctaatgcagtcgctacaaaaatggcaccttggtccattttcatatcttctgatacgcctttaacacctgctaaacttaaaacttgcgggttaactgctaaaatataggccatagataagaaagttgtgataccgcctaagatttctcttttaaagtttgttccatatttatcgaactggaaatagtttttcacgaatggatgctcctttttttaaaataccttaatagtttaatatcattcttaataaaaaacaataccaaaagcgaacttttcaattttctgattcaactttgttcgattttatctataaattcaagttctttaatgcatctttaaacggattattgtctaaaccttcatttttattcatatactttttcatttctttacgagatactttaccagaggatttagacttcatacgctgatccatatgtgcttgcgtttcagaatgtccacaaacacaacgatataccgcttctttccctttaccaaacaacgttaatttctttttacagtttggacatcttgcatttgttttgcgctgtacattctttttcgtcttacaagatggatcttggcacacaagcatctgaccatttttagtcttaactttaatcatgaatttaccacacgttgggcattcagtggttgttaaattatcgtgtttatatttacgatcactatttttaatcccatttacaacatctttcgtaaaatctttcatttcattaatgaatgttttcgcctgatatttaccacgttcaattaaaagtaatttttcttcccattgtgcagttaaaagtggcgacgttaattcttctggtgctaattctaatatttgtttaccttttgacgttactttaattttaccgtctcttgattcaatggcattcatattaaataatttatcgataatgtcggcccttgttgcaactgtgcctataccacctgtttgttttaaagtttgcgcatattttttatccttcaattgaataaagttctgagggttctccatcgcttttaataacgaaccttcattaaaatattctggaggtgttgtttcatgttctctaatgtttgtttttgaaatcttcactttatcgccttctgaaaaaggctgttgcatctctgtaatagactcaccttgtctaatagatttaaagcctaatacagttgttacattctctttcaaaacaaatgtgtgccctgcaacctctaaagttacagttatcgcgtcatactcgtgcggaggcattaaagcttctaaaaaacgctcgacaatcatatcgtataactttaattctctattacttaagtctgacataacaggtctcacttctgtaggaataattgcatggtgatcagatactttttgattattaaatatcgacatttttgatgaaaatgttttagagattaatgggcgtgcttggtctttatatgttgttgccatcgtcgcctgaatacgttctttcatagtatctaccatatcagttgttaaatagtttgaatctgttcttggataggttacgactttatgtctctcatataaactttgaagtgtattcaatgtttctttaggtccaattttataacgtctatacatatcttgttgtaaatctgttaaattgtacagtgattgcggatacgacttcttatgtttagtagcaacagatttaatcttaccatcgacatttttcaaattattaactatctgttctaaagtttctttattggtatatcgctgatttgattctagctgaaaatcaaacccttttaccgttaacgataatgtatagtattgttgtggtttgaactgattaatctcttgttgtcgtgtatttactaattgaatcgttggtgtctgaacacgtcccagggatagctgtgcatcatactttgttgttagtgcacgcgttgcattaatcccaacaatccaatccgcctcacttctcgctaacgctgcataatacaaatcgttatattgacgaccgtcttttaaatttttaaaaccttgttgaatagcttttttagtaactgagctaatccataatcgacggagtggctttttgttaccaactttatccaaaatcaatcttgcaactagttcaccttctcgtccagcatctgttgcaataataatatctttcactttattatctaaaattaacgcttttactgttttaaattgtttgcttgttttaccaataacaaccgttttcatatatttaggtataattggaaggtcttctaatcgccattcctttaaatttttatcgtattgttcaggtgtcgcatttgtcactagatgacctaacgcccacgtgacaatatattggttattttcaaagtaaccattacgcttttgatttatttgtaaagcatcagcaatatctcttgcgactgatggtttttcagctaatattaaagatttcataaattatcctttctcatacgttcttttatttcgaacgcgcttcatctattccactaatctttgatttaaattcaatgcttgcaaatgatgtgttaaatgtattgtaacatgttaatatcactattaactttcatttcagttgaaatactatataataaaagtaacaaaaagtacggaggtaatgacatgagcatagttcagttatatgatattacacaaataaaatcgttcattgaatattcgaattatgaatcagcatcatacttatataaacttcctcaacagtacaatgaaatagatgtattaataaccgatgcgattgaatcacctggtgtattttcaattaaagaaaacgattcaattaaagcaatcatattgtcttttgcatacgataaaaataaattcaaagtcataggtcctttcgtggctgacaattatgtattatctgtcgaaacgtttgaaacgctgtttaaaacaatgacttcgaaccaacctgacgatgctgtctttaacttttcttttgaagaaggcattcaacaatacaaaccattaatgaaagttattcaagcaagttataacttcactgactattacatagaagcccgtacaagattagaagaagatatgcaccaaccaaatatcattccttatcacaaagggttttatcgtgctttcagcaaattacacacaactacatttaaatatcaagcccagtcaccacaagatatcattgatagtttagacgaccatcatcatttgtttttatttgttagcgaaggtttacttaaaggttatttataccttgaaattgattcacaacagtcaatcgccgagattaaatacttcagttctcatgtagattaccgtttgaaaggtatcgctttcgagttgcttgcgtatgcattgcaatatgcttttgataactttgatattagaaaagtatattttaaaattcgtaacaaaaataataaactcatcgaacgatttaatggtctaggtttccatatcaactatgagtacattaaattcaaattcgaatcacgtaacgtaaaagatcaaacaatccctgaataaaataccaagcaaataccccacagtacatcattagcatgtattgtgggtttttatactttttgtaaatattgaaaattataagtagttgttttttactattagggcagaatgctttacaataacatgcaagtgtcaattaaggggagcacttgcataaatagtataggagagtgagtagtcttgcaatttcttgatttcttaatcgcacttttacctgctttattctggggaagtgtcgttcttattaatgtgttcgtcggcggtggaccttacaaccaaattcgtggtacgacgctaggcgcactcattgttggattaggtttacttattactggtttcgcaaaattcaataatcctactgtaattattgtcggtcttatttctggtgcattatgggcgtttggacaagcgaatcagcttaaatctattagtttaatcggtgtatcaaatactatgccagtttctacaggtatgcaattagttggtacaacattattcagcgttatctttttaggtgaatggtcttcaatgactcaaattatctttggtttaatcgccatgatattattagttactggtgtagcacttacttcacttaaagctaaaaatgaacgtcaatcagataatcctgaatttaaaaaagcaatgggtattttaattgtatctacagttggatatgtaggtttcgttgtacttggtgacatctttggtgttggtggaactgatgcattgttcttccaatctgtcggtatggcaattggtggctttatcctatccatgaatcataaaacatcacttaaatcaacagcacttaatctattgccaggtgtgatttggggaattggtaacttgttcatgttctattctcaaccaaaagttggtgtagctacaagtttctcattatcacagttacttgttatcgtttcaaccttaggcggtattttcattttaggagaaagaaaagatcgtcgtcagatgactggtatttgggcaggtattattattatcgtgatagctgctataattctaggtaatttgaaatagaaagttaaatactcatgtaacgtaaaaatgttatcgtttctgaaaattaccattcacttatagaatgattaaaattaattttcgagaattttacgttgaatgttcctctatatgtcccaggaaatacatggctctaaaaacaaaacgcaataacacatcatgacattattcatgcgttttaagactttaaaattagcgatactcttaaagtcttgatgatattcgtttatcaagtatgcgccatacatatgaagtggatagctgcataacgcactgcattatctgctagaatgtatgagttgaacaactatgtcataaataaaagcccccttttcacaatatgcatttacatgttgtggtaaagggggctctcattttctacgaatactaaaatggattttattttcaaatgtgtaaactagacaaacactgcctgatacacgtacaaaataatgatactaataatgattgttaaattggtcgtcatacctataaatggcagtgttcgatatttaaactgaataccataagaaataattgcgacaccaaccgggaacatccaagtgaccaacaatgtcgtcttaatcatatcatctgataccggtaacaacacatgtactaacaatcccgcaactaatgctaatccataatgcaaacataaatatttaatagtagcaggtatatactttctttccaaagtaaaattcaacatgacacctagcaaaatcattgataacggcatatttgcatgggaaagtatgctaaagaaatcgattgccacatgtggtaaatggatgtgacttatattcaatataaacattacaatgtatgtaacgagtggcactgattgtaataatttcttacctaaatatttaaaatcgaattgatcactaccttcactaaagtagctacctacaaagtaagtaattccaaacatcacaaaggcaccacctatatcagccataccaaaataaataagccctgttttaggccatatcacttcaattagtggatatgcaaacaatccaatattcatagcaccagtcatcatacctactgatccacgcatgtgattatcatattttctaaaaaaccagacagcaatcattttcgccacaataccatagataatcattaaaattggtaaaatggagaatgacaattttaattctgcactgtttaaattcacaataactaaagatgggagtgtgacattaagaactaatgtagcaatgacttgactatctgttgcctttatataattaatgcgcttcaaaaagtaaccaagcgcaattaataaaataatcatagtaaattgttctgtcactgttatcccttctttcaataatcttcataatttataactttaacatactccacagatattttagaagtctactgtttcatgctataatctacattaaatgcacttaattatatttcaaaggagtgttatagtatgtctttagaaaaccaactagccgaacttaaatatgattatgttcgtcttcaaggtgacttagaaaaacgggaatctttgaatttagatacttccgcacttgttcgtcaacttaaagatattgaaaatgaaattagaaacgttcgtgctcaaatgcaagattaataatctatcattcagacaataaatgcttttcattacataaatttgactagcattactctgaatacgttatattgatgaattgcttcatttttcgcttaattacatctagaatcacaagatgttgtcgtgttatgatttagtgtctcattaacaacatacgcgcatatctatcacaactgttttctacgctgctgtacctacatgaaccctttgaaacggagaggaagttatcatatgcaattttatctgattttactagcaatactttatctaattgttagttttattagtatttttaaaatggaagttatatttactcgcattttgagaattattatgggtgtgttgttattattcgtcttagcattaacgacgatgagttttccaaaagagaattggtgggtatttatcgtcttattactcttagtcggtaatgtcgaagtgacaggatttaaaatgcttaaaaaagatctaaaaggcgtaaacatcttgaatttaatgtcattatttatctttgtcatatatttcatcttaaccatcgtattattctaagtaataaacaaagcatgcaataacataattgcaaccttatattatcatcagattacatatcgaatgccagtattgttttattaacacatcgattaaatcgcacgtgaaataaggtctaaaatttcaaattttaaaaagccataaaagtagtcaatatcatgaccgcttttatggcttttatattatctatcgtttagtgaatcgtttttttaaagtaaagagaatttcatatattactggtacaactacaagtgttaataaagttgatgaaattaaaccaccaataactgtagcagctaatcctttcgaaataagaatcgagctatcttgaccaaataacaaaggaactaatgcaccgattgttgcaatcgccgtcattaatatcggtctaattctagtaccgcctgcttcgattaatgcttctttcatctccatgccctgctgctcattattaatgacacggtctattaacacaatggcatttgttactacaattccaattaacattagcataccaattaaacttggtaccgatattgtttctcctgtgattaatagtgcaataattacaccgataactgtaaatggtaaagagaataaaattgtaaatggtgctaagccacctttaaatgtaataactaggattaaatatacgataatgattgcagctaacattgcaaaggctaattgtgtcattgcattgttaatatcatctgatgcaccaccgatattaacctttacattattcggtttgtccaaattatttattttagacatcacttgtcgtgttgtgccacccacatctttatttgttactttagcagataccgtcgttgcataatcaccttgttcttgcgtcaatttacttggtgtcgttgttttaactaacgtagcgatatctcccaatttaatcttaccaccagtcggctttttcaaagttatattattcaacttatcttctgaccagtctgtttgcttattttgtttgactttaacatcaacagttttaccattttctttaacagtcgtaactgttttttctggtaagttttcattcaagtgcattgcaagttgacttgcagaaataccattttctgccgctttattttgatcaactttaatttcatactgatcatatgtttgcgataaatcagatttgacattggctagtcctttaacctgtttcattttctgttcaatatcttttacagttgattttatggcatccattgatggaccttttacagtaacctctacagatttattacctgcacctgttcctaaatcttgatttttccactctccaggatgtttaaagccatctgcatgtttaataaccttatccgcttctacatcaaaattaggcgtgtcattatcatattcaaccatgattgccatactatttgtactacccgttggatctactggactactaccgccaactgagtattgaattgtttttacatgctttttctgttttaaatatttttcaacatctttcgcatgattcaacactgcttgctccgtttcaccaggcttcggtgtataagtaatagctaaaaatttatcgtcacctgctgaaataaagctagtgcctagtctcggtcctccaaatacaatagttgcaaccaaaattaatgtacttaatataattacaatccacttatgatttagtgaccaatgcaatacttttttataagttgtactaacaacacctaatccttcttgatgttgtttattacgacgtttaacgccttttttaaatagtgtagctgccaacgctggaacgagtgtaattgacactaataacgatgctaataaactaaatgcaatagccaatgcaaaaggtctaaacatttcgcctactgaacctgatacaaacacaagtggtaagaagacgataatagtaactagtgtcgatgacattattggtttaaatacttcagttgtcgcactgataattaaattttcaccttttagttgttcttctgaatctgttaatcgtcgataaatattttcaacaactacaatcgaatcgtctatcacacgtccaatcgctactgttaatgcacctaacgttagtatattcaatgaaacatcactcaatttcagagcaataagcgccataagaagtgataacggaatcgatataatagaaattgccgtcgtacgaatgtttcttaaaaacagcaaaataactataattgccacgattgtacctaatgatgctttttcaaccatcgtataaagtgatttctcaacaggctttgcagtatccattgtttttgtgacattaaaatctttattttcatcaacgaatgtatcaattttacgttgtacatctttggctacttgaactgtattggcatcttgagctttagttatttgtaaattaaccgcatccttgccattcgttttagaaatagaagtacgcacatcaccaactgtaatatcagctaaatctcctagtttcgctgtcggcataccacttatattatttgatgctgacgcttttgaattttgctgcggtgatgcctgattaacatctgacatggctgaattttgtttattgtcactttgggattgagattgcccttgtcctcctgccaacgttaatggaatatttatgtttttaaaagcatcaacagattgatattgaccatcaacaacaattgatttatctttatcaccaaattggaacaatccaagtggtgttgttcttgttgccgtttttagatagttttctacatcatcagcagtcaatccatatttttcaagttcattttgcttaaatttaagggtgatttcacggttcgtctgcccatttaattgcgcattttgcacaccatctaccgtttgtaattttggtattaattgttcattcagtactttcgttacttttttcaagtcattctctttatttgaaaatgaatatgctaaaaccggaaaagcgtccatcgaattacgtcttaattctggttgaccaacttcatctttaaatttaattttatcgatttcttttttaagctgttcttctgctttatccatatctgtattattttcatattcaactgttacaattgaagcattttgtatggattgcgttttaacatttttcacatatgccaacgatcttacttgattgtcaattttactacttatttcatcttgggtactttgtggtgttgcacccggcattgttgttgtaactgaaataactggattttgtacatttggtagtaattctaatttcaatttagcactcgcgtatacaccgcccaagacaactaaaacaaccattaaaaagatagcaaacttattccccaaagaaaattgtaatagtttttttatcacagtacttccccctctttcactatattcaaaaatattttactcaaccattctatattgtgtaaaaaaatctgaacgcaaatgacagtcttatgagcgttcagatttcagtcgttaatctattttcgttttaatttacgagatattttaattttagcttttgttaaacgcggtttaacttgctcaattaattggtacaatggctgattcaatacataatcaaattcaccaatcttttcacttaaatatgttccccacacttttttaaatgcccataagccataatgttctgagtctttatctggatcattatctgtaccaccgaaatcgtaagttgttgcaccatgttcacgtgcatacttcatcatcgtatactgcatatgatgatttggtaaaaaatctctaaattcattagaagacgcaccatataagtaatatgattttgagccagcaaacattaatagtgcaccagaaagataaataccttcaggatgttccttttctaaagcttctaggtctcgttttaaatcttcatttttagcaattttattttgcgcatcattaatcatattttgcgcttttttagcttgcttttcagatgtttccatcttctgctgccatttagcaatttcggcatgaagttcattcaattcttgatttactttcgctatattttcttttggatccaactttactaaaaatagttcagcatctccatcttcatgcaacgcatcataaatattttcaaagtaactaatatcacgcgttaagaagccatcgcgttccccagtgattttcattaattcagcaaatgtttttaaaccttctctatcagatcgttctactgtcgtacctcgctttaaagccaagcgcacttttgaacgatttcggcgttcaaaactatttaataactcatcatcatttttatcaattggtgtaatcatagtcatacgtggttggatgtagtcttttgataaaccttctttaaatcctttatgtttaaaaccaagcgctttcaaattttgcaaagcatctgtacctttatcgacttcaacatcaggatcgattttaattgcatacgctttctcagctttagcaatttcttttgcactgtctaacaatgcatttaacgcctctttattactataatcaacaacaaaaccacgtgaaatataacatagcgtataaggtaatttaggtacttttttaaaaagtaactgcgcaacaccctgaatttcaccgtcacgacctacagcgattcttcgcgcgtaccatccagttaatttctttgtttctgcccatttcgttaattgtaataaatctccatttgggtgagatttaacaaatgcgtcatgttcctgattagtgatatgcatcttttccatgatttatgatatctccttctatttaacaatacctttaattatacagtttgtatcttatagtgtcgattcagagcttgtgtatgatttgaactcttatttttgaaatgtccatgctccaattaatagtttagcaagttcaaatttactcgttttaattgtgaatcattttatatctatgcttcctgttaaatttaatgttatcgtacaattaatacttttcaactagttacctatacttcaatatactttcatcatctaacacgatattcatttctaacatgaaccaatttgacttcaatgaataaatttctcctcaagcaaccacattaatgttcatatacaattacccctgttataatgtcaataatctaacaatgaggtgtttgatatgagaacaattattttaagtctatttataattatgaacatcgttgcaatcattatgacattgagtcaacctctcaccgtgaattactttagtttacgggttatacttatctttttcacatttatattatcaatctttttcattttaattaagtcatcacgattaaataatatattaacgattctttccattgtgcttgccattattcatatgggcattctcgctcatagtacttacgtatatttatactaatggttcaaagcgataaatagcacctctgataaaaattgaatatggtgaagttgcttgtgcgtcttttattataaccgaatgatattttgaaactttaccatcttcaattctaaaataaatatcatcattttttaaaatcaaatctgtgtaatggtcgttctcttctacaatgtccatatcaaaccatttcaaccaattcgatactgtttgtgattggtttttacttttcacaataacagtttcaattgaaaattgtttttgaaaatatttttgcaattttttagtacgcatggaatcactttcttcccattgaataaaaaatggtggcttaatttcatcatcatcctgattcattatataaagcaattgccactttaccttaccatctttatgtgtatctctttccatttgaatcggacctactacttcaacctgctcactttgtagtttatttttaactgcctcaatatcatttgtacgcaaacaaatatttttaaagccttgctcatacttctcttgaacaatttgagtagcaaaagcgactccaccttctatcgtttttgccatctttttcaacttttcattattttctacatctagtagctcaatataattttcattgatataacctaatttattgaatgttccatatttatgatgatacccacctgaatgtaattttataacatctcctggaaaactaaaccggtctaactgatctatataatgaatgatgtgatcaaatttcaatatcattagtatccccctatttacatgtaattacgcttattttaacaaagtataaatatttttgctcttaataattatatattgatttctaattgcccccgttttataattactattgttgtaaaaaaggttagctaagctaactattttatcttaggagatgtcacaatgctatcacaagaatttttcaatagttttataacaatatatcgcccctatttaaaattagcagagccgattttggaaaaacacaatatatattatggtcaatggttaatcttacgcgatatagctaaacatcaacccactactctcattgaaatttcacatagacgtgcaattgaaaagcctactgcaagaaaaactttaaaagctctaatagaaaatgaccttattacagttgaaaacagtttagaggataaacgacaaaagtttttaactttaacacctaaagggcatgaattatatgagattgtttttcttgatgtacaaaagctccaacaagcagtagttgccaaaacaaacatttcgcaagatcaaatgcaagaaaccataaatgtgatgaatcaaattcatgaaatattattaaaggaggcacacaatgactaatcaaggctcattaaataaatcacctattttcaccaaaagttttactattaacttttttgtcaactttatcgtatacctatgcatgtatttgttacttgtagttattgctggctatagtaagcaagctttcgacgcttccgattcattagccggattagttgtaggactatttattgtcgggtctttaattggtcgatttgctacaggtaaatttgtaaatcaaatcggacctaaacgattattatttattggtttaattgctttaattatcacgcaattactttattttattgatggatctttagcttttttaatctttgtacgtctcataaacggtatcgcaactgcagttgtgacaactgcaacaggtactattgcggcatacgttacccctgttaatagaaaaagtgaaggcatcagtttattttccttaagtttagtattaggtacagcgattggcccatttctaggcatgttacttattacaaaatacgcaattgatttactgtttattatttgtgtcatattaggcatactcggactcattatctcattatttataaaagttgatttcgaagtaacaaataacaaaactgaaactaatgtcattgataaaccaagatttagtattcatcaatttattgcaaaagaggccattcctgttgctgtaattatgcttttaattggcgttacctatgcgtccatcctaacttatttacaagcatttgctttagagcgacacctagtcactgcagcaagctatttctttatttgctatgctatagcatcgttaattactagacctattgctggtagattgatggatgataaaaatgaaaatattattgtctacccagcatttatcatgcttttcctttcatttgtatgcttaatttcaagctatcaaagctggttaatattacttgctggtgcttgcctaggtttagggtatggaaatttatcatctgcaatgcaatctattgcgataaaagtctcacccccgattaaatatggtatcgcgacatctactttttacgttggtctagatgcaggtgtcggctttggtccatcattccttgggttatttactcatatgttttcatatagtgaaatcttcggctttatggccgctttagcaatcattactatgcttgtttacttcttaattcatggacgtcatgtaactagaaatgccatgaactaaatatttatattcaaaaataaaaagcatgccaatctctattcatcatttgtctgtccccaagacgcaattatgatgtactgattggcatgctttttaagtttttagtttgtaacgcttaacacttctatttctttagtaattttatctaacaatttcttttgagaagtactatagaaatagaatacttgtctttcatccgtttcagaacgcaatttagaaataagctcttttttatagattttacggataatcacatcgattttacttgtatcccatagcatttcaaaatgtaatgtatccctcaattctttaccgctaatcttttcagcttcatacactttaaaaagtactacaaattcttcaattgaaatcttatgtgttgtttttaaccagtgctttaactgacttaactccctttctgcttctataaaacgttgaactttattactcataatatgatgcctcctatgtttcttcttagatgtttgtaattcatattattatacaattacttaaatttattatatatcaaacttagcattttatctattacaaatattaaattgctggctatatcttgtttagatttatatcttttggacaacttgttgtttattcgacaacatttatacctaaaaaagatatattacaactcaatggcatggagtgtgacactaatgttaaagaaccactaaagatttattatgtagtgattcttaagagtgggatagaaatgatattctcataaaatttatttcgttgttccccaacctgcattgtctgtagaatttcttttgaaattctctatgttggggccccgttccccaacttgcacattattgtaagctgacttttgtcagcttctgtgttggggccccgttccccaacttgcattgtctgtagaatttctttttgaaattctctatgttggggccccgtcccccaacttgcacattattgtatgctgacttgctgtcagcttctgtgttggggccccgttccccaacttgcacattattgtaagctgtctttctgtcagcttctgtgttggggccccgccgatttgtaaaaacattaaaaacgatcatttctattaaatctggcatagatatgaccgtttttactttaataaataatattgtattttagggagtaagacagaaatattaaagaatctctaatgatttaatatgtagtggttcctacacattaaccaccaatataattcatgtttatctttttacgttgacgattggcaactgtttgagcagttctctcatctgaatatcgatcatctcttatttgccataaagctttaaattgttcttttaattcttcgtcggtcacgccagaacgaataaacgctttaacgttaaatccatcgacagttgcaaataaacatccgtaaaacttcccgtctgatgacagccttgcgcgtgtacatgtagaacaaaatgattgtgaaacacttgtaatcaaaccaaattgaacaccgttatccttatggcgataatattttgctacttccccaaaatattttggttctacaggatcgatttcaaagtgctgctctatcatagtaagcatttcatctttagttacaactttgctgaaatcccatccattatcattaccaacatccataaattctataaatcgaatctctatatgtttatctttaaaatattcaagcattggtataatttgatcatcgttaatacctttttgtataacaacatttacttttacattcaaaccaatagacgtcgcgtaatcaatttgttctaaaatcgtagtcgctttaatattacgattattgattgattgaaatagcgtatcatcaatagcatccaaactgacattaattctgcgtagcccagcatcatataacttttgtccatgcttttttaataacaaaccatttgtagtcaaaccaatatcttcaataccatcgatttgatttaatttagctataagtacatctaaatcccgtcgcatcaatggttctccacctgtaatgcgtattttttttacacctaattctgcatatactttagcgattctagccatttcatcaaacgttaacagttcatttttaggtaaaaatacgaaatcatctccaaatacctctttaggcatgcaataatcacacctaaagttacaccgatctgtcacagataaccgtaagtcacggatgggacgtcctagtttatcttttatttgttctaccatttgtggacctcctaacggcttacaatttttgaattaaagcgtccaaatcatgctgataatttatatttttgtaccaatatgatggcgcatctacatccctgacatccaaataatccgttgataattcatgatatacatttttaaaactgtaattatcagaatgtagtgctttagttatagcgcctaatgcattcggactataaaatgcaattgttggaataaaacgtccatcttctttaaaagctgcgacatctaaatgattttcaataagatgagaaactaaaaactgatacaacgtgcttacagctttaccagtaatcattggtgtatcaacagaaacgacaaaaaacaattcttcttcaggatgttgcttcatgattgtataaattcctgctaatggacctttatcattatgattctcatcatctataacaacatttggatatttaaattgcgttgccaattgcgcatttgtactaataataatttcattgaacatatttgttgattctaatgtcttaattactcttctataaaaggtctcaccgttcacttccgcaaaagctttgggcttaccaaatcgtactgaatgaccacctgcaagaattattgctttcatgctcccttaacctccactaaccggtggaattaatgcaacggtatcattaggttgaatgaaatcggatttttgtacaaattcctcatttacagcaacttgaaactttttattattgatttgcggataacgttcaaacaataaatcttcaaattgttgtacagtcaatgcttgttcaagcataatatcttcctgtgctttttgtaatatatctttaatttctgcgaagtaaagcaccttcatctctcttattcctccctcttcgcttcttcataatttcctttttgatgcccttgccattttgaaccatcttcccaaatttcttttttccaaatcggaacaatttcttttatacgctcaattgcatattcatttgctcgataggcatctttacgatgcggtgaagaaactgcaattaatacagcgatatctgaaatttgtaatggccctattctatgaacaatactcgttatcgttccaggccatttttcatttatttcatctccaatttgtgccaatttcttttcagccattggaatatacgcttcatattctaaatattccgttttgatgcctttagtccattcgcgaacatgaccggtaaaaacaactactgcaccttgatattcatttatagtgaattcacgatattgttctgtttgtatcggttctgtcacgatttcaaattgtttcattcatttcaatcctctatgttaattgtgtatcacaatcatttttaattttatttaataaccattgctcaaatgctgtaaaatcttcatgctccctaacattaatgctataacaaacattcgacaattgttgtaatacttgcaactcttcttcatttcgatagactccgactttttcaaaatcagcatttttaaagccttcaactaatacgatattggtgtcaattgtaacagatttttcaataatttgagtaagattttgattatctacacgtgttacagtttgctgatattgaaatccttgtacaatactttgatctgcccctgcttcaaaatgcttcatgtgatcgacgtctgaatcctgtaattgaatatcttccttaccatgcccatgatgtttaatagtagcaactgtataaccatgtgactttaagaaagagacaatatgcctcatcaatgttgtcttaccagactttttgtaccctacaatttgtaaaatcataaaagaagttcctcttcagcagcgtcagattcagtcaatataatatctactgtatgacccgctttaaaaccacgtgacccacctggtaacatgaccatacagttagcatgtgcaatcgctacaaccgcacctgatttattgaatcctgaaggtactacagtagctccagcacttgttaacgttgctttagcacgtataaatcgtgtgaatgggtttgccttggtaaaatcttccattaatgttgctttaattatttgcgggaagacttctagtgcgccacacatatgtttaacagctggtttcacaaatagttcaaatcctgtaaaacaagctgatggatttccagataatccaaacaaatattttccatctgcaaatgcaaccgttgttacgctaccaggacgcattgctactttattaaataacacttccgcctttacagccttataaatctcaggtaaatagtcaaaatctccaacagaaactccgcccgttgtaataacgatatcatgtttttccatagcttctttaacgacttgtataccactatctaaatcatcttgttgtgttttgtaaataccaacttcaagacctaatttttctgctaaggcacgaatcattggaccattagagttacgaatttttccatcttctaatacatcattaacatctaataattcgcttcctgttgcaataacagcgacgcttggttgcttaataactttaacctctgcatagccatatgttgcaaggaccgcaatagcccctggattaattacttgtcctttttttagaacaacatcgcctgtcgttgtttcttcaccttttaaagatatattttcattttttgaaaatggtttgcgaattgtaaatgtatcttctagttcaatcgtttgttcaaacataacaacagcatctgcgccattaggtatttgtgctccagtcataatacgcaccgcttcgtgatccccaactaatttatcagaaactgaacctgcaccaatatgatcaatcactttaaactcaatgcgattctgaccacttgccccttgtgaatcaacactgcgaattgcaaaaccatcataaggtgatttatcaaaccttggtatatcataagtagctacaatatcttctgctaagatatgatttagacttttttcaagtgctaccgtaattgccggcattgaactctgctgattaacgatacgttgaattgcttctttaactgggattgggtttcttttttctactaccattaaaaatcatctccaaaacttttattttttcatgatatactagatgcactaggaggggtaaaatgactgagtttactcatattaatcaacaaggccacgccaaaatggtcgatgtatcagacaaacaaattacaaaaagaactgctgtcgctcattcaagcattactgtgaatgaaactatttataagcagatttctaataacaccaatactaaaggcaatgtattgaacactgctcaaatcgctggtattatggctgccaaaaatacatcaacaattattccgatgtgccatccattaccattgactggcatagatgttcacttcagctgggatgaaacaaatgcacccctttatactttaaacattcaaacaactgtctctacaactggcaaaaccggtgttgaaatggaagctttaaccgctgcatcagcaacggctttaaccatttacgacatgacgaaagcagttgataaaggtatgattattggcgaaacctaccttgaaagcaagtctggcggtaaatctggagattttcaacgccaatcaggtcaataaattattttgtaagctcatgaatcagatgatttaattctggtttaatgagcttttctaatgctaatttaactgcgcctgttgatcctggaatcgaaaatatcaatttatcattaactgtacctgctacagcacgagacaataatgcacgcgtgccaacatcttcaacataactcaaatatctaaacaattccccaaagccttctatctctttagttaaaagtggttttactgcttcaatcgtcacatcacgttgtgcaatacccgttccaccagtcgtaatgatgacatcaatatcttcttctaaccacttcttcacctgcgtcgtgatggctactttttcatctttcacaattgtataatgtgcgtcactcacttcaacgtcatctgcttgtaacaattggcgcacgcattgaccacctttatctgtatcaaagtctctagtatctgataccgttagtacggctgctttaactgtacgattcaatttaacgttttgatgttcgcccataatattacactccttttgtcttatctttttttatccaaacaataaattcattagatgtgtggcatctgatgtgcgtgtcatgccatgtattaaaaaccttccacctttaaaagcaacaatgcggtgtcctttaaattcaaacataaccatatacgaattactgcgataatttagttgatgttgttttaaaaattgaacaagaatgtcgtgtgtaattgatgcattttcatactgtacagtgtctctaccacacaatgttgcataacgttgttcattcttgtttaaatacggataacttggtacatctccacaagttgtacaggctgaacgttgcattttactgaaaccaaatgaataatgactaccttcccaaatatcgccataagttatttttgtgtcaattagttgttccgttaatactttcatcgcatctcttaattgtaaacttgttgccatcgtcacggcaggttgaatgacccctactgtatcacatgttaaatttaatgctggcaattgtggtaccaaacagttaaagcaaggtgttttaccaggtataaatgcagcttctgtatatgtactctgtacaacaccaccataaatccaaggtatacgatgtttatatgcaaaatcattaatcagttgtcgtgtttcaaagttatcggttgcatcaataataacgtcaacgtcctgcccatgtgtttctaaaaaataataatccacatgggcaatataatcatcaatatcaacatcactacgtaacgctagcaaatgctttttagctgcaaccactttaggcatcattttcaaagcatcttcttcagtaaacaatgtttgtctttgtaaattactaaattcaatataatctctatcaacaatgattagtttagcaatgcctgctctaacaagtccttcagccacatgtgtacctaatgcgcccataccaataatcaacgcacatttttgatttattttgctttgacctatttcacctatttgtttaaataaaatttgccttgaataacgttcttgactcacattaagttatcctttctttttatcattactttcattatatgacgcgcgtcaatgtctctcaaaaaactgcccctaaaaaagagtttaaaacatcattaaaatgctgatagaagcatgcacttctacaattttaaatacgttctaaactctttaatggcaaataaatgattacccaattgtaataatttcatgagccatttgttctgcttcatagtttgaatgtgtcacaaatatgattggtatttgccattcgttgaaaatacgtttaactaatgtaatactctcatcttttgtagtgtcatccaaactagaaaaaggttcatctaataaaattaaatctggtttcgtgctaagtgcacgtgcaagtgctacacgttgtgcctctccacctgacaatgtcataggatattgtttcatcaaatgatcaatgtttaaagtttggattaattgatcgatgtgttcagatggttcagccataaaagtaatatttttatagaccgtcatattaggaaacaattggtagtcttgaaacagatatccaatacgtcgttgttgaattttaacattcacgttttttgccgtatcagtaagcaattgcccattcacttcgataatagcttcatctgttttacgtaatccggcaatcatatttaaaacagtagttttaccaatgccagatggaccacgaactgcataaatttttggttcagtatcatctatattgatgcgaattaaagtgttctttaattgatatttcaaattgattttaagcatctagtcgacctccttatatttatctttattcaataaattaattgtagatataaccacaatagagaatgcgactagcactaatacccataaccacgcttcattttctctaccttgttccactaagaagtatatttctaaaggtagtgtattcgttttatttggaatatatcctgcaaccattaatgtagcaccaaactcacctaatgcacgagcaaaactcatcattatacctgctaaaatagagcgtttagctaatggtaaaattaatttgaggaaaattttcgtttcacttgctcccattgttctagctgtattaatcattttcgtgtctatacctctgaagccttgcacagtatgttgatacattagtggaaaactaacaatgacagatgctatcacagcacctgtcaaagtgaacactacaggtaaatgtagtacattcgcaaagaattgaccgattggtcctcttggcgagaagatgattaatagaataaaacctaataccgttggcggcaaaacaataggtagtatcaataaactttccaatactttaacccacgaacccttacgacgatacaaccatttagatataaaaatacctaaaaccgttacaataatcgtactgattacagcaactcgtattgatatccaaaaaggtgttaagtcaggcatggattacaactccttatgctgcaaagtggtattcttttaatatttctttagctttatctgattttaagaattccatccactcttttgctaatttactatctgatgtagcaccagcttcgtatgtgattggcttcttaagttctacttctttaattacttttacagtatcaatttttttattttgtttatataagtcagttttatacacaaaaccttgtttcgcattacccttttcaacataatttaatacttgttttacatctttagcataaacgattttactttcgacttctttaaataagttattgttatctaaatactgtttcgcatattttcctgctggtacagttttcacttcacctaatgctaatttatcattgtcttttaagtcttttactgaagtgtaatttgaatctttatcaccaattaatactagactatttttcgcatatttatatgtatcatgtgctttattcttgtcttttaatgcatctacatctttagtatttgcagacataaatacgtcaacaggtgcgcctgattcaatttgttttcttaatgcccctgatccaccatagttaaatttaatatcagcatttttatgctcttttttaaattctgaagctaatttcttggttacatctgttaaacttgctgccgctgcaacttgaatttcttgtttcttaccattggctgcgtcatcttttttacttacattattatcgttagaattagagcaaccagctaatactaaaagcattgcaatcacaacagcaaataaacgtttcattttcattgagcgatccccccatttttaattatatttacattttcattatacacttactattatatttgaaaagaaccgttgcctgtttatatattgattcaaacaattgtcaaattttcataagattgatatttattaattgatgccctagtatgtacattctcgaaatcaatttaaatcaaactgattgctcgctattaatttttatcaatcaaatttcaaacttaagcaaatatgttaaaattttaagcaaattgctttaaaataaagttcaagctaattaaaggggttagataatgaacaaagatgtatctttagatcaaccaattgttagatatgaagatggaaaattattcaatacaacagatcaatatgtgacagaattcccacttacaattatggtgaatggtgaagaatttgcgactgttatatgcagtccaacaaaccttgaggagttagtcattggatttctggcttcggaaggtgccattttaaagcgagatgaattaaaatctgtactgattgatgatagtaaaggttttgcccatgttgaacttaataaagatttaggcgatcgctttcaatattccacaaaacgaatgattgcatcttgttgtggaaagagtcgtgagttttattttcaaaatgatgctgctatcgctaaaacatctatgtctaaaatcactttaactccaatacaaattattaacatgatgactcgattacaaagtgcaagtcatatttaccaagaaacaggtggcttacataatgctgctataagcgatggtttgacattttttgtacatcgacaagacattggtagacataacgctctagataaattatatggattttgtattcagcgacatattactgtccgagataaagtattaattttcagtggacgtatttcatcagaaattttaattaaagccgcgaaaattggtgttggcgtcattttatctaaatcggctccgacaacgcttgctgtaaccttagctaatgacctaaatattacggcagttggatttattcgaaatggtggctttaatatatacagtcatccagaacgtatcattgattctaaacaataacatattcattatagtgtgacataatgaacgatattctacatgaatcaacaatataaaagcactatttttataagtataagtagctcaaaacaatttaaaaagcagtaagttgatttctactcgaaaccagcttactgcttttttattctaatacaaacctatcatcaatcgttaatttccaatatcttcttttaatatttgataacaaaatgattggtaaacataaccttgctttgcatacatatcttttgctgtatcttcaccatctgcaactaatatgattggtttgtgattttttgatatggcgtattcacctatcaacgattgaattgtagatccaattccttggtgccgaaattgttctaatacaccaaatccatctaattcaatgtaattttcactttcaatgacatctacaacgccaataggttcattatttaaataagctactaagcgtttaatcacatctttttgataatgttcccttaccattttttcatgtgcatctgcatagtcttttccaaatggcaaactaaattgatatgcaacttttaaataggcatctatatgcgactcgtcaacgatggcaatttcaacgtcagagttacgcggcaaattggcaagcgcatcactttctatggcatacaattccataatacctagttcaaaattcatatcttcaaacatagccatccaatgattatcaagttgttcattttccgggaaactaaacgcataatgatttgaaccttgatttgtatgtaattgatgttgacgttctaagtctttcagccatcgctcttcggtaggcgtctttttatatatccatgtgttgcttgtgtatcgttgtggaaaagaaggcgttaaataaatcaactgctcgtcgtcattttcaaatatagtaccgttacaatatatatctgacatacttatactagccattgacacctactcctttcactttaataaatttcaaagcaacttattcaattactttactatcttaaatatgattattttaatcccataatttgacgaaactgcgagtgattaagtaaagctgtaccaatcaaacttgctacaattgcttttaatatatcaccaggtaaataagctaatgaaattgaaatagctttcgtaaatggtatattaataatcatgcccataatcaatgtaccaataacatctaatgctataacaccaaaaactaaaataccaacgaataaaatccagaaattaatttcattgatgaatctatcacgaatcgcaccaatcatgaatgctacaactggatataatagtaaaaaccctgctgaaggacctgcgaatacaccaatgccaccgcgaccgcctgataacagtggcaagccggcaactactaataataaaaagacgataacacttaatgtgccatatttacgtcctaaaatcacacctgctaagaaaataccaatgttttgaagtacaattggtactgaagaaaatggtagtggaattaccggtaccaatcctagaatagcgataatcgctgtcattaaagctgtatatactaactgttttgttgtcattttttacttcctttcgtatttcatgaccattattatagcaccattgtaaactttaagaaacgaaaagtttacaatgagttgttctatataaattaaaacattaattattctacacagctgttaatttacttttttagcaagtgtagttatatagtcaaaaaatgcattgttatctacatgatttatgacattaattttgcgcccatctttacactcaaatgtcttaccttgacttgggccataacttattacatctactttcttctcaatagaatgaaccaagtccttgttaccaatataagcagtcgttaaaacatcccataaaaagtatgtagaatttgttataaagtgtgttaatggtggtaccgctgcataacttactcctaaaaaatcaatgcccgtatattggcgttcattcgcccatctttgtctaacatctaacgttagcggtacttgattcgtactttctaaagcaatcatatcaatctctatatcgctatcaaaaacaattttaaccgcttctggatcccaatatgcattccattctgcagaaccatcatgttcaggttcttcaacatttccttttggtaaaaaggtaccacccatccaaactaatttttctatatactgaacgattgatgaatctttttgtagtgcttttgctaaatctgtaagcgggcctgtaaataataatgttactttttctgattgtctctttaaagtttgaataatgtcttcaaaggcttctttgtcgctcacatttgaagcaacgtgtttgactggctcatttaaaattggcaatgcgtccataaaaaaggcatgcatacgccattctttaggaaatggattttttcctcgttcatatgatggcgcaacttgaatatcttcatttgaaaaacgattaataatttttactgatgcgctcaaagatggctctaaataacaatcagcaccaattgtactgacccctatcaaatgaacgttttccatttgtaataataaaaatagagatactaaatcatctacaccaccatcgtggttaaaataaactttcttagtcactcgaaatcccccttacatttcattttccattaacaatattatgtttttataaaacgttgttatatatctttctacaaaatcataacattctgttgtaatccttttaaacctcttctttaattgatagccattccctgatatggcttccataaagtatgtattaaaataattatgatataacttattaatgaagagatacattgagctattttctcaggtatactactttagctgtaataatactaatctatcattaattaaattgaatgataacaacggcacttattatttttaaaaaatacaaaactctaactttcttgctataaaaatgagagcctaatacaatatcaaaagattgatatgtttcagactctcatttcactaacttatatagctgaattattttgcagctttaattaatttttcttttaaatctttacgcatgaaatctaatgtataaggatcgttgtaccagtatgtaccagcatcaactttaacaatatgtccttctttagtagctttcaaattcttccacatgtttgttgattcatatcctggtgtaggtttaccttcacttgtactcacaatgtaatcaccagcatatttttcaatttcttcttgtttcacttcagcccaacctgcttttgcagttaacttttgttgttctggttgcatttttaaaccaaatgcttgatatagtacttctccaccacgaccccagttatcgccgtaagtgtataattttttatcaaattcatcaaacaatgacactgttgcatcttgtccaattgcttttttaatttctttaccgtctttagcagttgtttcttcccaatctttcttccaagcttttactttatcttctttaccaacaattttccctaacatttcttgttgttctaaatatttatgcttattatagtcaacaactactgttggtgctactttttgatattttttaatgtctttgtcagtagagtatacaataattaaatctggcttttctttagcaactttttctacatcgccatcaccaatttttgtaacaccttcaaatttatcttttaatactttgctttgatcaacttgttgatttacagctacaatgtttgcacctaattttttaagtccaccagcatatgttggcgcaactactgcaatgcgtttagggtctttcggaatgtctaccgttttgccatcgtccattttataagatttagtttcagctttgttatttttttcaccttggttcccacacgcagctaacactaataacataattattaatggtaataatagttttttcataatttcctcctattgaaaatgattatcaattattccaaaattatacaagattgcatatacatttacaatagctagtgttatttatttttttattttcgcaaaaaatttagcaaaatatcttaacatccctataaacccccacaaaaaaagggtaaatccgaacgtcaaatgtcatctctttatgccaatcaacgatcgatttacctttttaaatttaaaatgtatttgtaatactcttagcaatatttgtatatgctgcatcttccataggtggattgtgtaatcctgcacgcatgtcacgatagtaacgttgtaatggtcgattcatttctaagcttttagcaccaactattctcatcgctaaatcaatcacttcaagcccttgattcattaccatcactttactcgcacttgttgaatttcttatctgactgtcatctttatattgttgatagccttttgctgtactccataaaaattgtctagcacataacaatagcgtttccattttccctaaattttgttgcacagttggcaatgttgcaatcgttccttcaatactattagggctatgttggattgcaaagtctacagcataatttctagcagcttgtgctatacctaaataacagcttggtatatgcaatatccaaccatttggcgctttacttttctctgtttccactaaatgttttaatggtacttttacatcatttaatattaaatcatgactttctgtcgctcgcatacctaatacgtcccaattatcggcaatttcaacaccaggcaaattcctgtccactaagaaaaaaccaacactttctaattcttctatataagcagcaacaataatatgtgttagtgctttactcattgaagtatatgtcttcacaccatttaaaatatacccatcatcagctttaacagcatgtgtacttggtcttccccctcttgttggactacccatttcagcttcactaactgctctattaactaatgcaccattattaatttcaacagcaaattgctccaacatatcttgagaccataatttctgttcataaatttgtcctacgacactcacatgccaaccaatagataatgcagtggcaccatcaagttcgcctaaaaatgattgcaaaataaccatgtcttctatggtcgcaccttcaccaccatatgcttttggtaacgttaattttccataaccttctttaattaaccattcaatatttttatatggaaattggctatgttgatcattatattcagacttagccttaaatgtatctccaattgctttgaatttttcaatccattttctttgaatttccgttgttattaaaaaggaattatccatatcattcatattagtcaccccacacaacacacaatataaattatttattcctagtttaacactcgactttaaaaataaaaaggaacgtgctgtgaacaattaaaagaaagctgataattcgattaagtatgcacttaattttatccataaaaataccaggctgggacataaatcaatgttctatgctctacgaagttatattggcagtagttgactgaacaaaaatgcgcttgtaacaagcatttttcaattctagtcaggggccccaacacagagaatttcgaaaagaaattctacaggcaatgcgagttggggcggggccccaacaaagagaaattggattcccaatttctacagacaatgcaagttggggtgggacgacgaaataaattttgcgaaaatatcatttctgtcccactcccgatattcaaacaatactaggtttgatttaactatcaagcatctactttgtcatgtttaataccagcaaataataaaatccatgtcacaataataaatggcaatgttaatgcaggtaagccaaacggttcaagcaatgttgttgtaccaagttgcaccactactgttaataacacacctaaaaaagtcgaaatataagggttaatcgctgttttaaatgtatatcctagtgcgattgccattaatacaaagttataaccgaataacccttgattaatatcatcataattaccacctaatagagctacaatgataaagcttaacaaactagctataacagctaagagtgctgcttttcttgatgctatcaatatgccgattaaaatacatacgccaccaattacactcgcttcgataaatacttgactgaatccttcaaataatgactgaatgaaatgtattcgatcattgttgctaaaattaaccgtttcaatgttttgaggcattaactttaacgatgtatctacaaatttaacctgtcctgaaagtaaaattgtaaaccaagtcacaatgacaaaaggcatcgtcagcatcggaactttatatggtcttaaaacttctctcactgcagcagcaactggtaacgttaataaagttgctatcattgttataacaatatctaatcctgacttatctaaaaatattgttaacgcaatggcagttaacactggattaaatccagctaacccatcattaatctctgcttcactataattaatgtaacgtgcaaatgcataagctatgatactacctagcatagctgctaatccaactgtccagttggccacgaataatccaatcaagataaacaaaccagtccacttattactaattaacactacttgagatatatttttcaaaagcacatctatcattttcaaaatgcccaccctttttcttgaatgtttactcattaatatactaccattttacaaaaagttatattaaaaactctattttccaaatcctaaatatcttttgctatttgttttaattgtaatcatatatttttaaatacgaaatagtaaatttattttttactattgcgtattaaactttgtatattacttgtttatcacaacaattaggattaatataaattttgtaaattgtatctaatatgaaattgggggttttaatttgcattttacacaacgagagcaagacaaattaatgattgtagtggcggcggaagttgcacgtcgtcgtaaagcacgtggtttgaaactaaatcatcctgaggcattagctttaatcagcgatgaattattagaaggtgcacgcgatggtaagaccgttgcagagttaatgagttatggtagacaaattctaaacaaagaagatgtcatggatggtgtcgaacacatgattacagatatcgaaatcgaggctacgttcctcgatggcactaagttaatcacagtacatcaccctattgtttaaaggaggcagtcaaatgataccaggagaaattattacaaaaagtacagaggttgaaattaataaccatcatcctgaaacagttatcgaagttgaaaatacaggagatcgaccaattcaagtgggctcacattttcatttttatgaagcaaatgcagcattagatttcgaacgtgaaatggcatatggaaaacatttagatattccagctggagcagctgttcgatttgaacctggggataaaaaagaagttcaattagttgaatatgctggcaaacgtaaaatttttggttttcgtggaatggtcaatggtcctatcgatgagtcacgtgtctatcgcccaactgatgaaaatgatgaatatgcaggtgtattcggagataacggtaatgaaaacgtgaataaaaaaggaggaaaaagatcatgagctttaaaatgacgcaaaatcaatatacgagcttatacggtcctactgttggagattctattcgtttaggtgatacgaatctatttgctcaaatagaaaaagactatgcagtttatggtgaagaagctacctttggtggtggtaaatctattagagacggtatggcgcaaaatcctcgtgtaacacgtgatgacgtgaacgttgcagaccttgttatttctaatgccgttattatcgattacgataaagttgttaaagccgatataggtattaaaaatggttatattttcgccattggaaatgccggcaacccggatataatggataatgtcgacattattataggttcaacaacagatatcattgccgctgaaggtaaaatcgtcactgctggtggtattgatactcatgttcattttattaatcctgaacaagcagaggtcgcattagaaagtggtattacgactcatattggtggtggtactggtgcttcagaaggttctaaagcaacaactgtaactccaggtccatggcatattcatagaatgttagaagctgccgaaggtttaccgattaatgtcggttttacaggtaaaggacaagcaacaaatccaactgcactcattgaacaaatcaatgccggagcaattggattaaaagtacatgaagactggggtgcaacaccatctgctttgagtcatgcattagatgttgctgatgaatttgatgttcaaattgcattacatgcagatactttaaatgaagcaggatttatggaagacacaatggctgctgttaaagaccgtgtacttcatatgtaccatactgaaggtgctggtggcggtcatgcgcctgatttaattaaatccgctgcattttcaaatattttaccttcatctacaaatccaactttgccttatacacataatactgtagatgaacatttagatatggtaatgattactcaccatttaaatgcggctattcctgaagatattgcattcgcagattcacgtattcgtaaagaaacgattgcagcagaagatgttctgcaagatatgggtgtattcagtatgattagttccgattcacaggcaatgggccgtgtaggtgaagtaattacacgaacatggcaagtagcacatcgcatgaaagaacaacgtggtcctttagatggtgattttgaacataatgataataatcgcatcaaacgttatatcgctaaatatacaattaacccagcaattacacatggtatttctgaatatgtaggatctatcgagccgggcaaactagctgacattgtcttatgggacccaattttctttggtgttaaacctgaattagttgtaaaaggtggattaattaactctgccgtaaatggcgatgcaaatggttctatacctacatctgaaccaatgaagtaccgtaaaatgtatggtcaatacggcggaaaccttacaagtacgtcaatgacattcgtgtctaaaactgcttatgaaaatggtatcaatcgtgcattaaatttaaaacgcatggtgcgtccagttaaaaatattagacaattatctaaagcagatatgaaaaacaacagtgcaacacctaaattagacgttgatccacaaacatatgaagtatatgtagatggagaaaaaattacaagtaatgcagcaactgagttaccattaactcaaagatacttcttattctaggaggaacatagaatgattgttgaagaaatccaaggcaatattgccaatttgtcaaattcagaaaaacaaaagcacgtcgaaaaagtataccttgaaaattcagatctcattaagcgtattcaaagagtcgttacagaccatggcactgaaataggcattcgtttaaaacaacctattgacttacaatatggagatattttatacgcagatgaccataatatgattattgtggatgttaattcagaagatcttttagtgattcaaccaagaacattacaagaaatgggagatatagcccatcaattaggaaatcgtcatttgccagcacaatttacagagactgaaatgctagtacaatatgattatttagttgaagatttattaaaaagtttaggcatcccatatgttcgagaagaccgtaaagttaataaggctttcagacatataggacattctcatgattgatcatacacacttaagattatttcagttctgtgattcacagtttccaacaggtgctttcagtcattcatttggtcttgaaacatatattcaacgaaatataattcatgatgatcatacttttattgcttggttaaaaatgtttttacaagagcaacttacctattctgatggtttagccatgcgtttagtttatgatgcattggaaaatgatgatacacaaaaagtattgcacatagataagctgatgtttgttcaaaacttacctaaagaaacacgtgttggtgcaaaacaaatggggactcgcatggttaaactggctttagaactttataatagcccatggattgcttggtatcatcaacaaatgcaaaataagaaagcaaagttaaatccagctatttgttttactatgctaggccatcatttaggtgtagatattaaaacgattattgattattatttatatcaaaatgtttcaagtttaactcaaaatgctgttcgtgctattccacttggacaaactgctggtcaaaagatagttactcatatgattccttatatagaagaaacaagaaagcagattttcgaattaaaagaagcagattttggcatgacagcgcctggtttagaactaaatcaaatggcgcatgagaacgtcaatgttagaattttcatatcataggaggttataattgtggcaaatccgattaaaattggtattggtggtcctgtaggtgcaggtaaaacacaattaattgaaaaagttgtaaaacgtctttcaaaagaaatgagtatcggcgttattacaaatgatatatatacaaaagaagacgaaaagatattagtaaattcaggagttctacctgaaagtcgtatcattggtgttgaaactggtggatgtcctcatactgcgattcgtgaagatgcatctatgaattttgcagcaatagacgaattattagaacgtcatgacgatatagaactaattttcatagaatctggtggcgataacttagcagcaacatttagtccagaacttgttgacttttcaatttatattatcgatgttgctcaaggtgaaaagattccacgtaaaggtggtcaaggtatgattaagtcagatttctttgtaattaacaaaacagatttagctccctatgttggtgcatcattagaacaaatggctgaagatactaaagtatttcgtggtaaacgtccatttacttttactaatttaaaaaccgacgaaggtttggatgaagttatcgattggattgaacgcgacactttactcaaaggattatcataatggatgaacaacaatggactgggcaacttgatttaacagtgttttttgatggcaatcgatcagtatcaagagatattttctttgaaaaagcacttaaagtgatacgtccagtttatctaaatcaatctaccattcctacattttatatagtgaatgtaggtggtggttatttagatggagatcgttaccgtatgaatgtgaatgtcgaagataacgctaaagtgacattgacatctcaaggtgcaacaaaaatatacaagacaccttccaatcatgttgagcagtatcaaacttttaatttgaaagataacgcatatttagaatatgtcgctgatccaatcatcgcatatgaaaatgctaaattttatcaacacaatacgttcaatctcaataattctagttcattattttatactgatattttaactcctggttattcaaaaactggcgaagccttcaagtatcaatatatgcatttaataaatgaaatttatattgaagatgagttagtcacatatgataatttattattgaatcctaataaacaatcgataaatgaaataggttatatggaacattactctcattatggctctgcttatttcatacacgaagatgttaaccaaaaactaatcgattcagtttatgaaaccattagttcttatagcaatacattcgattgtcgtgttgctatttctcaattgcctacacatggttttgcagttagaatttttgcttatcgcacacaaattatagagaaaatacttggaaccatccaaagctatatcgcagaaaatatttatgatcgtaaacttgattttctaagaaaatattaaaataaaaagactagtgcaccttgtttcaagcttaataagctgaaataaggtatggctagtctttaactttaattaaagcatcttcaatatttaaattttaagttaattttatgtcccaatgctgaataaataacttcgttttaataaattgttatcgttcaatgttattaaacgcaattaaccttgatttaatttttaatgtattcttctaattctgaaatcagtttttgaatatttgctttttgtgtatctgtaacataaacaataactgttctttcgtcttgtaaacttcttttctttgataacaattttaaatcttttagcttttgtaaagctttagttaaatagtaaggtttgaactctgagcacttagcaatctctttagatgagatttcgttagactcacttcttaaaatatgatttaaaatataaatttcttcatagttcaaattgaacttcttttttgtatctctgaaaaacttcttaacttgaaatgttgcgttgactaaatcattaatgtcattaattttactcattattaaaccactcctctgatgcacatcttgttgtagcaaggttcacatgtaatttattaaatcgaaactctatccaactatgttataaagttcattctaaacaaataagtataaaaattcaatatttttattactagaatatggttaaatacatttatttcttataataatttgatgtttaagatattttgccaaattgaaaattattagtctgaatattttgtatcttaactgatatgtaaacttttaaaattttaatctatatcaacgtgtttgatttgatattttttatattaatttgatggcttgctcacaaaatttataaaatataaaaaaagaagagctttaaatcataacgcatgccatttatctttaaatgcaatgagttatcattcaaactcttcttatcaacctacatacattgatattatactatcatatgttgttttacatattcaacaaacatttcaacgttatcacttttaatatcatgcattgggacattaccaatattaaatttgaacattatagtttgaccatcataatctatcttctctatttcattataactaatacttctataataaaattggccattcatatctacattcataattaatctttcatttgttgctataaatgccccttcaaattcattctcaccttgaacttgatactcaattattcctagcactgacggaccctttttttcagttggaaataaatcatttggattcacattatctaaaatcataatatccctcccacttaaaactataaactattcttcataggtatatgaaatacaagtgattaactatttattattaagcttaacttgtattcccttttcaagataattataacatgcttgaataagcatagtgactttagaaaacttttctcgcttgattgttacaataacacgcctttcatctaattcacatctctcttttttaactaatcctttcaaaattaaacactttaaaatcggactaaccgcaaatatcgggtgatggaattcaccctgtaattctttaaccgtcaattgacctttatgcagatttaatattcctaaaacgtataactcttctaatgataattgacacatatttaaataacactttagatttcgcaacaattcttgtgacgacaataaatacgatacatagtcacaactaaaatcaaatgtgtattgaccaaaataacgttcaatatagtcactaagctcattattcatatattctattttatctatatgcatttttttaatcgaaatagtcaatttacgttgatccctttgatctcttcctttcaatagccattgatgattgtttaaataacttaacatttgaagaagtgccatcttagattggatttctttcatttttaataacctatctattgaagcgctattggaatcagaattatcatatttaactaatagatttaatagtttcacttgagtcaaagtgagatgaaatgaatatttcaacatatcattaatgactttcaacattagtatgtgtgcagttaaacgcttaactttaaatttagacatctttaaaacctctcttaaaccatgcctatatctcaagatgatatttcaaatgaacaatactattgcttgagaccattaatgaatgatcataaatatttctttctataaaattagctttccaataactgtgttgttgcataatatcattcacaagtacaccattttcggaagtatgattatctttatctatacttaaaacaatttgtttagttttagcatggctaaattgttgaagacccttacacgataaacgtatagcgtctgaattctcatttaacaatgcggctggcaaacaaatgacacattgtacttcatgtttgaacttcgttacaatcatcgtgtcattttgataaataacaatccctcgtaattgattaagtatatttatgataaaaatgaaaattgataatctagtcaaatttatttctttgctcgcttcacttataattgacatgtgaataataagtcctcgaaattttgtataatttgtcaaaagttcagtaaccttattaatatcagaaattgtgattttttcttttaagtcattattctcattaatcaaatctacatcacatataattttagaacgtgcaatagacacctgttctatttgtcttagcggtaagataaaatagtctattagatgatcaatttctttatcatagcgcgtattcaactcatttggttccagatgatatattaattcaaatactcctatataattatctattaaacgtttcagtttttgaattgcagtagtatttaagtcgttaattaaaaatgcaatcttacatctattactctcaaaagtcatattaaaaattgtagctactagcttttctatcttgcctctttcagtactcgttaacaattccttatattcatgtttaatacgaaatactacatttacattgtaattcactatcttttgaagtaataaagtgatttgttcaatcgatagctcactgcttgtatctaatgtaacaattatatgcaagttttcaggattaacacctaatctttgaatgatttgtttaatagtatagtaatccatccaataaaaattacttcctttaatatagatgtttttaggttgatacatttgactcctttttgtaggctcaaaaggtatatcaatctcgcgcatacttgaagaactttgattagtatcatcaaataattcaattatatttttatcaatttcaactaattgggaatggttaattgaatgagatgttggactatatctttttctaattaatttaggagtgtcaccatacgtttctttaaagaggtgtataaaacgagaataatgattaaaaccatgactacttgctatttcttcaattggcttcttagaagttaaaatatcaattaagcaatgctccagtctaatatgatttaaatattgaataaaattactatacggtgtcgctttaaacatgtcacttaaagctttgtttgtgatactaacttgattaatgacatctttcctatttatctttttatggtggttgtttgttaaataatcgtgcacttcttcggctactaaatgacgactaccatcgtatgtatttaatgacattaattcaacacacatgtaattaataatcttatcattagcattataaggctgttgtttaattttgctgtagattaaatacttaatcaagattctaaaagtgctagcaacctcatttgttaatatcttgccacgcatcatatagtttgcattcataaacttcaaaaatgtctttgcacttacttcaacaacacaacatacactatcatcatgaccatcaatctgatacaaatcattcaacataataacggtgacatcatttctttttatatcatattgttgtagattgattgaaactacacctgtaccttgtagccaatatataatttttaagtttgcttccttcacactactcattttcatacttttaaaaatatgtagtgaataattatctgtcatcttacatcctcacatatacaaatatattgatttactcctgtttgtctttctaaaatcaattgtcaacatctaatattcactaccaattatatcgccacatgttttttagcagtaacaaaacataaatcgattatatcaaataatacttttattaaaacatttttttatgctaaattaggatattttatccattaaatatacatttttatccaaataccaaagctttcataatcaaagaaactcgatcgttcgtgtcgaatttttatgcattttctgattaaaagtcctatattatgcacaaaatatacatttagaattttcagtaatattacaaatttgtaacagacttattttcgaaacattcagttttcacaaagaatgccgtagttataagttttgcaaaatgcaaatttctatacttttaaaattctattgtgtcaagatattagcaaaaaattacaaaacgttaacaaagcacacaaggacgctaatttctgttatagtctttcttgtcgtttaattacgagagataacttataacattaattttgtcacacggacattacgaaaatattttagatttaaaatttttaggaggatatttttaaaatgaagaaaatcgctacagctactatcgcaactgcaggattcgctacaatcgcaattgcatcaggaaatcaagctcatgcttctgagcaagataactacggttataatccaaatgacccaacatcatatagctatacttacactattgatgcacaaggtaactaccattacacatggaaaggtaactggcatccaagtcaattaaaccaagataatggctactacagctattactactacaatggctacaataactacaacaattacaacaacggttatagctacaataactacagccgttacaacaactactcaaataataatcaatcatataactacaataactataatagttacaacacaaacagctaccgtactggtggtttaggtgcaagctacagcacttcaagcaacaatgttcaagtaactacaactatggctccatcatcaaatggccgttcaatctcaagtggttatacttcaggacgtaacttatacacttctggtcaatgtacatactacgtatttgatcgtgtaggtggtaaaatcggttcaacttggggcaatgcaagtaactgggctaacgcagctgcaagagctggttacacagtgaacaatacaccaaaagctggtgcaattatgcaaacaactcaaggtgcatacggtcacgttgcatacgttgaaagtgttaacagtaatggttcagtaagagtttcagaaatgaactatggttatggtccaggtgttgtaacttcacgtacaatctcagctagccaagcttcatcatataacttcattcactaatttgtgatgaaagtgaattaagccaacaaggtttcaataaccttgctggcttttttaatttctatgaaaaaaatcgaattggtaaaaatctcaaaatttcgattttcaccaatccgattcactctgtaataaagaataaacaacatacagccattgacacacccaaatttaggcgcgtcaaatcggctatacattgataaatttttagttaaagtacttacaaatatacttgccttcaaattctcaattaatttagtcattacaaatcatgacataaaacttacattacatatattaacatgttccgctacaaaacatattcagtatatgtatagaggatatttattctaagttaaaaccttttcaaattataaccgctacaattataaatgattaaagtgtttcaacatattatatatattccacgctcacattaagttaaacgtgaattcgatgactttttaatacctatccctgtaaaaccatagataattgctataattgcgcataaataacatggtactgtccatatgaaaaattctccaacagagacatgaagttgattcgtatagtaaatacctgatgttccccatggtattaaaggtaagaccatcgtacttgagtcttcaagtgttcttgataaaacggaacgagagacttggtatttttcgaacaaatctttcattaacacaccgaccataataattacaatcgaagcaacacctgcagcgaatacaagcgcaatacaacaaataacagtaatacatattaaacttcctacagaatggatgcctttagaaatagtagttaataagacttctaaacatcctgctttttctacaatacctgcaaatgcatatccgcaaaagatcgttactaatatttgggtcatactcatcataccaccctgttctatcaagcttttcacaccggatgaaatatgagactgatgtatcattgagtcgttaaaaccactaaatgttgctttgaaaccatctgtcattttgaaatgatgattaaaagtccccactataatggcagaaaagcttgatattagcatagctggcactgtagccattttaaatagcaaacaaacaatgatcacaattaagggaacccagacccatatgttaatttgataaatctgtgcaagctctgacaacaaagtttggatctgtttatcatttgaatgccctttaaattgaaatccagcaataaaccatactaataaacctatgattgacgcaggtatcgtcgtccacatcatcgaatgtatatgtttaaatatattaactttagtaacaagcgccgctaaattagttgtatctgataatggtgacattttatcgccaaacacagccccagctataatagcacccgctgccatccctggaggaatccccaattgattaccaatagaaataagtgcaattcctgcagttgatgcagagccccatgctgtaccagttgctacagatgtaacagcacttataaaaaaggctgatattaaaaaatagcttggattcaataaatctaagccataataaatcaaggctggcactgtgccagaaaacatccaactgcctactataattcctaccgctagtataattaaaattgcaggcattgcagtatttaaacgttctgcaatgcctttttctaaatcttgccatgttaagcctacacgttttgcaatccatgtggcatatgctgaggcaataattaataatacttgaattggaatatcaaaaaacacaaagcctgttacaacaacaataaccattacaatcattgtcgaaattgattctaaaaaggttggttttcttgtcatcatctatcgtccccttcgcttattgatgagaaacctcttttcttcaatttattgcttttgcataatactatatccttttctatcttcaagccatcatttattttaaatatttttctaaatcaagcttatctaaaccaatttcttcaactgttaagccttcctcaaagaagtctctctctaaaatagttgatgcaattacaattactgcatctatatttggtgtcggtacatcaataacacgacctaagcttgaccataatactaaaccatatgcaatatcttcagttaaatatctgctttctacatgatttggtcctggaatttgtgaaaatactgggcttgtattaaacaaacgatttaatggttcatcttctttatcacgttctaaataaccacgttcaatacgtgattctttagctgttgataattcaaaacctaatctacggcctaaatttaaacgttctaattcgattgcatgaagtaatctaactgtatgtttagtaattccttctttatataaagcgaactcaccagcataatcaatgcgaccgacattcaataatgttggtcctggatgcacttcaggattaccattttcaagatttgttttaattaagctttcctcttttactaaatgatcataaatacttgaaactttgtcataacaatcatttagacagcttctatcatatgttgaaaagaagatacgacgtacatttagagataaatcaactgctgcattttcaaaatcgacacgcgtaccatacgtcaacgtattagcttccgctaattgtggttttgtttcaatatgtctatcttctaaaacattcataaaacgaattgaccccattgctgcagccatgttgaagaatatcaactgattatcagttacatgctctgccattacatcagcataatactctatgtatgaagatggaataatcacttgaacaatttcagcatcttttaaaacatattccatatcatcactaatatcagtgaattttacgaaacgttcatcaccttcattattaaaatcaaatccgcccttttcgattgcgttttgaaacttacttatagattgattacgacaatataatttaacatcgtggcctttgctcaccatatctactgctgccgtaactgcgccatttcctgatcctacaattgctattttcataaacaaccctctttctatctttggttaaaattaaaaacaaattatacgtaagacaatataaaaatgatgcgaattcattacgcatcattataaatgttaagtatatataaccttaaattaacctatttaaacgccgacgtccaccaattatttttatttttaataattgtttaataaacatgtttatttttgattatattttgttatagttaaagataatattacaattttcaaaggagtgtctaatatgacaactgaaatgaacgatataacacatcatcaaccgaatcgcaaatccaatgatgagaacattatggcgatgcttatctatttattaagtttattcacatctattattgggccactgattatatggttattgaaaaaagatgaatcgaaactagttgatcgtgctggaaaaaattatcttaactatacgatttcatatattatttggtctatcgttttagtcgttatcactttaataggcgttttcctaattgctaccgatattgatttcattatcattataggtttcatcattacatttatcggtattttatccatattcgctttctcaatattatcttttgtattcacaattattgcgtgtgtcaaatattataatggccaagaatatgtaatacctttaacaattcgatttatttaaacatattacaaataaatatttcctattaattatctgttaatctcattgtaactttgactaatttttattacaaaattagtcaaagtttttttattcttttacaaatcaataacattccccacaagaagcattaattttgttaaagtaactattgtcatcaattcgagatgtgagaataaaacagtcgctacgttttatttataaaaaaagatatagaactttggaggactttattcatgaaaaaattagtaacagcaactacgttaacagcaggaatcggtacagcattagtaggtcaagcacatcatgcagatgctgctgaaaattatacaaattacaacaactataactacaacacgactcaaactacaacgactacaacaactacgacaactacatcatcaatttctcattctggtaacttatacactgcaggacaatgtacttggtatgtatatgataaagtaggcggagaaatcggttctacttggggaaatgctaataattgggctgctgctgcacaaggtgctggattcacagtaaaccatacaccttctaaaggcgctatcctacaatcttctgaaggaccatttggtcacgttgcatatgtagaaagtgtaaacagtgatggttcagttacaatttcagaaatgaattatagtggcggacctttctcagtaagttctagaactatttctgcaagtgaagcaggtaactacaactacatccatatttaatataaacacgatgatacatattgtcttgaaacttaattctagtacatatgtcatcaaaaaactttgagctttcctttataggagaagctctttttttgctatttttcgttgccacctacttatttatatttactcccatattcataatattaattttttcaatactattaactttaaaactatgttatctaatttaattaatccagtttttccacattacaatattcatagttctacagtgcctaagttatatcacctccatcaaaagtacacgcttacatcattgatacacaagacatcatgacatagttgtatactgtctaatcttctactatactaagataaaaggagtgatcttttatggaaaaagtttatgttgctggtgcaataccagaagtaggtttaaaacttttacaagaacattttgaagttgaaatgtatgaaggtaaaggattagtcgataaagacactttaattaaaggtgttaaaaacgcgactgccttaattagtttattatctacaaacgttgataaagatgttatcgatgctggtaaagacttaaaaatcattgccaactatggcgctggttttaataatattgatatcgagtatgcccgagaaaaaagtatagatgttacaaacacacctaaagcatcaacaaacgcgactgctgatttaacaattggattagtacttgcagtagcgcgtcgtattgttgaaggcgaccaattatcacgtaccactggatttgacggatgggcacctttatttttcagaggtagagaagtatctgggaaaacaatcggcattatcggtttaggagaaattggtagtgcggtagcgcgtcgtgcaagagcatttgacatggatgtactatacacaggacctaatcgcaaagaagaaaaagaacgagaaatcggtgcaaaatatgtagatttagatacactattaaagaatgcagattttatcactatcaacgctgcttataatcctaaaatgcatcatttaattgatacagaacaatttaaaatgatgaaatctacggcgtatttaatcaatgcctctcgtggtccaatcgtgcacgaacaagcactagtgcaagcattgaaagataatgaaattgaaggtgctgcacttgatgtatatgaatttgaaccagatattaccgatgacttaaaatcacttaataatgtagtattaacaccacatattggtaatgctacatttgaagcacgtgacatgatgtctaaaattgttgctaatgctgcaattagtgccgttcaaggtgagaaaccacaatttatcgttaactaataattgaatttattataatgacattataaaaacaagaacccccatatgttgagctctcgtttcaacatacgggggttttcatattgttgtattatttttctttcgatttatataagaatttagtttgtccagctgctaatgcatttggcatcattttcataatacgatttcgaactgcaacaactaaacgactacgatattgggcaattttaccgatttttctagaacgcttaattacttttgcagtatgtttgacacgtattttatcataacgctgtaatgctttttcaaagtcgtatgcgttaaaacaatttactaatacaatagcatcttccattgcttgtccagcaccttgccccatattaggcgttgtcgcatgtgctgcatctcctagtaaaatagtacgaccataaacaaaagatttgagtggtttcaaatcataaatattatgcaataagatacctgtttcactttgtttgtctaatatctctctaacttcatttggatagtgattaaagtatgcttgcaaatgaggtttaccaaacgaactatatttatgattgttttccttcgagttaattgtaatgaaccaatatgcttgattatttaataacggaacaatacctactcttccttttcttccccagtattcttttgcacaatccggatgctttaaatcaatatcatcaattaaacctctaaagcatgtatacccttgatataatactttactgtcagcatttacagattgtctcactttagaatgaattccatcagcaccaatacataaatcaaatgcttcactttcttgttccgcgaaatgtatggtaactttatctgtctcattatctatatgcgtgacttcatgatttgtaaatattgcatcatcttttacataagatttaataatgtcaattaatgtttggcgtggtaacgtcacattcaatgtattactttttaatttaacagtagttaacgggcgatctttgtcatctaacactgtcattgtagataagatttgcccagcatttttaatacctttagctaagtcatgattacctagttttttaagcacattatctccgataccaatcccagcgccaatttctttaactgactcatttttttcaaagactttaatagtatgaccttgttcttgtaataatgcagcagctgttaatccaccgatgcctgcacctataattgctatcttcatattgtcacctctatatttttcattcttttctattttatcacatgcactattgtttaaaaatgactcttggaactaacgtttcatttttaaagacttaagtgtattatctgcaccattgtatattacatgcacatttagacagcaatattcatttacataatgtacatttgtaacaatgatgtgggagcttgggacataaatcaatgccctagggtctataatattatattggtagtagttgactgaatgaaaatgcgcttgcaacaagcttttttcaactctagtcaggggccccaacacagagaatttcgaaaagaaattctacaggcaatgcgagttggggtgtgggccccaacacagagaaattggattcccaatttctacagacaatgcaagttggcggggccgcaacacagaagctggcggaaagtcagcttacaataatgtgcaagttggcggggccccaacatagaagctggcggaaagtcagcttacaataatgtgcaagttggcggggccccaacatagaagctggcggaaagtcagcttacaataatgtgcaagttggggtgggacaacgataaagaaatactttttctatagaaattagtatttcttatgcatgagttttactcatgtattcctatttttaagtacacattagctgtggctaatgtgtaagaaccactacataataaatcattagtggctctttatcatttctgtcccactcccgcgtttttgttaggttaaaatccatttaactaacacactcagaatgcgctaaaggagctcgaaacaataaattgttccagcccctttaagcaccgatgtcttatttataatatgtttgtctaatatcatctttctttataccaaactgcttataggatttatccattaatttggcaattttatctgcccagcgaatgtcactcgcatattgatgttgcgcaggattttctggattccatcgcatttgatataaattcagttgattgttttcaaaatattcattacgaatgaactttgcaccaccaagtatcgccttatctggtgatgtccattgttccttttcagcataacttttcccactacgaacagcactactatcgaatgctcctataccaaaaaagttgtaatagcgtttttttccatctttaatgccttttgctaattctgatttgccgttacctgtttctactaatgcatggctaacaagataaatgacattaacctcatatttttcttgagcttctagaaaaactttccctcgattttctaaaatccccttaccttttagcaattggttaacttcagattccgacattggcactttttctgtgatatccatatacttcatatcattgtctttatgtgaaatagtcattgctttagcaatttcattattatttgcttcaacaaatttaccatcctcttcttttgtctgtacaatacctttcccttgttgcattgaaacagcctcatcaaaagagtaattcacatcatttttaaacaatttagtttcattcacgatgagtaatatagcaaaaacaactaaaataactatcaatagtagcgttgaaatgcgtaacttgaaattcttcttcatatagacaaaacctcatttttcttacttagacaataaaaaatatgccactacaatcgctaatattacgattaaaaaagaagcgttaacgattactttcatcgttgttctatctctgaacatcatattaaagacaactagactaattgataatgaaacagcaaaaaaagtaatagctaacactaatttcatcataaatagacagactaaacctatgactaataatgtattagaaattacagctgacgtttttaacattctcgaattaatatgcactcaccctttttatttaaataacttacataatcataataatacatgatgtttcatagccctgtcgatggttgattatcaatagcacatgattttctcgattctcaaaaatattgtttaaagtttgatgaagactcggatacaaataatatttcaatataacttaaaacagtgcccctacaccaacatgcaagaacactgttatattcaaagacaaaaaaatcggaaagatgaaaactaaaaaacttttacatcaatccgatttattatagacccatattaatcttctcgagacataccttttagcatattaagcatatatgttaaactacggttcatgtcgtcatcttttaaaacgcctaacagacttcttacagatgtcttcgcattaggactcgcttgatttgcaacatgtaatcctttattaactttattaaggaagtcacttaaatctgatacatttaattcacctaataaaaataccattgaagccatatttgttaatagaccagtatagatatctttgttgagctcaacagcaaatttattaataatcacttgacgtcctctaactgcgccatttaaagcatctaatattttagcatcatctaacactttaataagtttgattacttttaatatactatctttattcgctgcaattgcctctgtaacttcatttatactttctaacttaatttgttcttctgatttttctaagcgtctaattttagaagatattctctcagccattatttatccacctgatttcctgggaaaacataatctggacgttcccattttttctgtacttgaacactgtactgcggatgacgttttttattgacacggaaattattagggttcaacggtgacttaccacgtttcgtaattacctccaaacgacagcttgtacgtttataagatggtgtatccgtgtattgatcaacatcactattagttaataagttaattgcacctagatctccattttccatcgcatcattatttaatggaatatagatttctttacctttaacacgatctgtcacatgaacttgtaataccgcttctcctgtttcagatatcaacttaacttctgcaccttcatgaatgcctctatcttcagcaagttctggagaaatttcaacaaatgcacgtggcactttgtatttaatcattggtgtttgataagtcatattaccttcatggaagtgctctaacaatcgaccattatttacatgaatatcataaacttcatcttgcttaaagtaattatcaaatgataatgggaataactttgctttaccattatcgaaattaaatccttctaaataaagtattggttcatctgtaccatctggatgcacaggccattgtaaactattaaatccttctaaacgttcgtagcttacgccagcatataatggtgttagtctagcaatttcatccataatttcgcttggatgtttgtaattccaatcgaaacctaatttattagcaattgcttggaatattttccagtcaggtttagaatcacctaatggtttcaatgcttggtataaacgttgaatacgtcgctcagtattcgtaaaagtaccatctttttctaatgaaggacttgctggtaagacaacatctgcaaatgtagctgtaaatgttaaaaattcatcttggactaccatgaaatctaatttttcaaaagcagcttgtacaaaattaatatttgaatctacaattccagtatcttctccatatagatataatgaatgaatttccccatcatggacaccttcaaccatttcatgattatctttaccaactttaggattcaatttaacgccatattctttttcgaatttagcgcgaatatcgtccgcttcaatactttgatagccagtaattttatcaggcatactacccatatcactacaaccttgaacattattatgtccacgtaatggatacgcacctgtaccaggtcgacgataatttccagtaactaataataagttcgaaattgctgtacttgaatcacttccaatgtcttgttgtgtgatacccattgcccaacaaatgacaacggactctgctttggcacattcttcagcgaacttaatcaactctgcttctggaataccagtagcctcttcagcgaatgccattgtaaatgtttctaatgacttgtaatattcatcaaaatcttcaacccactcttcgataaaggctttatcgtgtaagtcatgatcaatgatatatttcgtcactgcgcttaaccaagccaaatctgtacctggtttcggttgataaaaacgatctgcgcgttcagccatttcatgttttctaatatcaaacacatgtattttttgtccaaataatttttgagcacgcttcatgcgtgatgcaataaccggatgcgcttcggctgtattcgtaccaatcaatacagacattgctgctttttctaaatcttcaatactacctgagtcaccaccgtgtccaaccgttctaaataagccttttgttgcaggtgcttggcaatatcttgaacagttatcaacgttattagtgccaataacttgtcttgctaatttttgcattaaatacgattcttcattcgtcgctttagaagaagaaatgaatgatagtgcatctgggccatacttttctttaatagatgtaaaattatctgcaatgacatttaatgcttcatcccattctacttcatggaactcaccatttttccttactaatggtttcgttaagcgttgatctgaattaatatgtccccatgaaaatttacctttaacacaagtcgcaattttatttgctggagaatcatgtgatggttgtacttttaaaatttctctatctttagtccaaacttcaaatgaacagcccacaccacaatatgtacacactgttttagttttcttaatacgctctttacgcatttctgcttctgaatctgagattgcaaatagtggaccataaccaggttctgcttttttagttaaatcaatcattgccgctaatgaaccaggttccgtatcagtcatataacccgcattaccttccatgttaacttccatcatcgcattacacgggcatacagttgcgcattgaccacaagatacacatgacgattcattaatcggtacatcattatcccaaatgacacgtggatgctcacgatcccaatcaattctaattgtttcatttacttcaatatcttgacatgcttctacacaacgcccacataagatacattgatttggatcataacgataaaatgggccgtaatctttttcgtatggcttctctttatattcatacgtttgatgctgaagtccccatgcatccatcgtattatgaatttcacaatcaccattattataatcacatactgtacaatacagcatatgcttttctaaaattcgatcaagcgcttctttttgagcatctttcacgtcattattcactgtatttactgtcattggacgatcaatcactgtactacatgaacgttcaattttaccatcaatctcaacagtacatgtatcacacgtttgtattggtctcattgattcgttataacaaattgaaggtacaaaagtatcttgcgatttaatgaattcaagtaaatttgtacctggttctacaagataatctttaccatcaagcgtgaccaccaaatgttcttgcatactattcaccccatctatatatttttccgtaaatgacttttaataaattgcctaatttccacctaaaataaagatgccccacacatctttcagatagaatcaatataattgtattactttaagtgtataatgttaagcgtatttttgtattttttatttttgcaatcatttttatttgaaatattttgcgcgaaattaaatcatctttttgtttaattgaaaataattatcattattagctttccaattatctgtttcacgcttttttgccatttctttcacaaccttattaatgacaatacttaataatcacctcacctaaaaatcgctataccatttataaataccctttttctgaaaattaataacccaagtttgataaatatctactgtcatttagaaggtaagatttatctttaaattaaatttgtaatggattaattaataaaaatcaaatcaggcattaaataaaatagcccataaatacaaagtgttatcaccttctatttacgggctattaattctattcgttattctttatacagctcattctatctaattaatttgtgtacaattttgataacttattttcccttagtttactattctagattatcttttaataacttagtactttcagcttttgactgctcactaggaatgaagtagtacaatccgtcactttgaatgccgccttgaccactcaattgatgtttattaattgtgtcattagcatctttataattgcttctaatcgtattcaaatcacctaatgttaaatctgttttaacattattttgaatttcattcattagactattaaaatgtgtaatcgatgatgggcttgcaatcttattagccatcgcttcaagtacaatttgctgacgttgttgtcgaccaaagtcaccaccagcaccttcttctttacgacttctaataaacttcaatgcttgatcaccatttacatgtgtttgctgtccttttgtaaaacgaacaccatcaacagtgaatgtatcattacttactacatcaacaccgccgatgctatctatcatattatgcaaaccatccatatcgattgtcgcataatgatcaattggcacattcattaatttttcaagtgatttaacagccatatttggtccaccatatgcataggcatgtgcaattttttcagtagtaccacggccaacaatttccgctcttgtatcacgcggtatacttactatttcagttttcttcgttttagggttgatagataaaatcataatactatcactacgctctccgccaccctttttcttacgatcagcatctgaatcgacaccaaataaagcgattgtgaatggatcaccatcgtttaaactcacttttttatctcttaattctgaatgattgcgatctaacggattgtgtatcttattaccagtaataaaaattttagcagctacatacacaacagctacaatcgctaagattactaaaataccgaatacccataaaaatatttttttcggtaggctcattttacttttagacgaacgtttcaatcccaccactcctttactattccttacatactttgtctgttttctctatttattatatagtaaaataatttttttactatacttctgtagacgtataactattttttatcattttttatctctcaagaatatctatctgtatttttgataaccaccatttgcatttaaaattttaagtaccgtttcatgacatgctttattacttataataaaaggtgcaccctttaaatgatcaattgccttaccatctaaagttgtcatttttagattcaatagttctgcaaataaaaactgtgcagcaatgtcccaaggtttaggatttgtattaatatgtgccccaaattgaccttttgccactcgcatagaatctaatccgcaagcaccaactaaacgataactaaatgaggcatcaaataaatcttgcaccgtatccagattcatcacttgtgcattaaacgatataatagcgtcttccaattttaacgatggtggttcttccatcttaattccattacaaaaagcgccttctcctcgtattgctttataaagctttttatgcggataatcatatacgtacgataacattggtttaccttcataaaaatacgccaatataatacaataatcttcttgctgttttactaaattggcagttccatcaatgggatccataatccataaatgattaatttcattcgtaatcatttcattacttttttcttccgctaatagttggtgttccggaaaatgtgttgctaaaaattgttgaaattgttgttgaatctgtttatctacatttgtaactaaatcaaatcgatgacgcttcgtttctgtagtcatctccgtaattaattgtggaataacattgtctatttgtttcaaccatgaacatattaacttatctatttgctgtaatgttttatctgtcatttcgtccaccacttctcatatcattatcattttattattaccctatattaaaataatcaacaatacaactgaagacttcttcattttatgcataaaaaaatcggctagtcacgtgctagccgacaaatagaaaggaaagtaagtaataaatattgaagatgttgtgatgtaacttgaacgattaaaagctatctgttatatagctctacccctttgtttaatcgctccccctgttacaagtaatatcatagcacaatcttttttaaaatgtaagcgttttccacgaaatttttccgatttttttaaaaagatattgaaaatgtcctcattgtcactcttatgttatactttgtgtaatatatcatcttttaggaggtggctgtcatgaataaagctgaaaggcaaaatttaataattactgcaattcaacaaaataaaaaaatgaccgctttagaattagctaaatattgcaacgtatccaaacgcacaattttaagagatattgatgatttagaaaatcaaggtgttaaaatttatgcgcattatgggaaaaatggtggttaccaaatacaacaagcacaatctaaaattgcattaaacttatctgaaacacaattatcggccttatttttagtgcttaatgaaagtcagtcgtactcgacattaccatataaaagcgaaatcaatgcaattataaaacaatgtttaagtcttccacaaacacgcttaagaaaattgcttaagcgcatggacttttatattaaatttgatgacacacaacatatgacactcccaatgttgttttccgacattttaatttattgtacagaacgaaatgtgatgttagtagatcataaggttgatgataatattaaagccgaaaacgttatatttattggccttttgtgtaaacatggacattggcatgcagtcatttatgacattgctcaagacaaaactgccgaactcgaaattgaaaatattatagatatttcgtattcattcggtaagacgattcaaaccagagacatatccattgataactatcatcaatttttaaaccccatcgattcctaaactatggagtcgacggggttttatctacgcataaatacttattactgatataacgaaagaaacaaaattatttgctatatgtaatgcaattgttgaacctaggtttcttccagattttaaataagtgaaaactaatatgatggatagtatgagatatggaccaaactcaaacggtgactttgcatcagtcacatgaataaatgcaaataagaacaccgaaacaatactcatagctataaaattaaacttcttacctaattctccaattaaaatatgtctaaatacgatttcttcaactattggacctacaatcacaattaataagaatgctacaggtaaaaatgcaggcacttcaaacattttatttagctcaagttcattggctgtttcactatattgcaaatgtttaggtagaaactgtgtcatatattcatatgtataaattaagatgagagcaataatatacgttattgacaatctaagccaatattttttgatatacgcaaaaccagcccgaagccttgatggcatcacttttaaatgaaataaataaaatgcgccaatcccaatcgtatatgctaaagcttgtgtgatagtcgctacaaatatcagattactatcgatttcataataatcaaacaaaattggtcctatgtaagctgcaatgtttagtgcaaataataatacacctataattggaattataagcaaatctctccatgctatatctttaaacgtgtatttctttttttcattttccactgttatatcctttcctgtttaataattgatttttggaggtacttctacatgataaacgaaactaagtatatgagacaacaaattactaatttgattcaaatcattgatacgattaaatataatactttaatgacagattggaacattcaaacgcatatttataaatttaaccaaatagttactaatgaattgaataagttcaaaggctttgaaacatcatatataataaacgaaaatcaagtttcctattatgaaattataacactacttaataaacgtcccctccgacaagtcgactatggtaacaaaattcaatatcttaatttttatcatacagaactatctaacgcattatttgcaattaaatttgcccattaacctatttttcataaaatgtcatttaaacaagttatttattaaaattcactttattacataaattatacaattaaaaagtttcttcaaattgtaaagatgcattaatcgagttataatcataatgattaagatggtagatttagtcttatataactacatttactaagatttaaatagatgagtacataatgtataaattgggaatatacagtatgacttacggtaatatatcaatatgttgatatattatttgcacatgggagtatgctattttttatctatacatcttaaaaaatttacagttttataattcaatatcattaaacaaacaacatattcagcttatttttcattctcttacgttacaagttgtaaataccatcgcgttaaacaacaatagccaacgctaataaaatatattgcgttaaagtggagtgattaatatgtcaaacgtactaacagaaatagatagtcaatatccatatatgactaaaaacgaaaaaaagatagctaaatttatactaaattcacctcaaaaggtgattaaaatgaggtctcaagacttagcaagcttattagatattagtacatcatcagtcattcgattcagcaagaaaattactgatggcggttttcatgacttgaaaataaatatatctaaatatgttcctaaagcatcatcaatttacaatgttgaattaatgaataacgaaagcacagaatctttaagaactaaactccatacacgtactacacgcgcactgaatcatgctaataacgaattaaatgataaaactattgatcaaatatgtcattgtttaaaacgttctgagacgatttttatatatggttttggcgcatcttttgtagttgctaccgacttataccaaaagttatcaagaataggtcttaatattcaacttgttcaagaaacacatatttttgcaacattattagcaactcacaattcgaacgacagtgttattcttattactaacaatggtacgcaaagtgaaatgcaatcaatggttaaagttattgatgactaccatatacctataattacaattactagtacaagggataatcccgtagcacaggcatcaaatattgttttaacttatgggaaaactgatgaaaatgagatgcatatgggagcaacaacttcattatttgctcaaatgttcactattgatattttatattatcgttatgttgcattaaattatcacgcatcattagatttcataacacaatctaaaatggctttagataactatcgtaaacatttatcaaatattaactttaaacattaacagtcttatataaattctttaatcatgtcatataataatttatgcatcatttccaaagcttacatgtcttttatcttgtataacatacgcatatgaccaatgatttgataaggccattcaatttcttatattaaaaacaaacgcagttgattaacggattcattccatatatcaattgcgtttgttattttaatgatgctatttttttaagcccacagtaaaaactatcgatagtattgccttttaaaggtaaattcttactacaacttcgatttaagctaaatttataaaaaaatgcgcctactcataacacttctttggctatttaactttaataagctagggccaagtttgtcataaaataagcgcacattataatcatactattttgcttttacattatttttattatatctaataaaataataaatcgttacaatcgttaagaagataacaccaataagcactgatattctagtttcaacattaaataccataccaaccaatactaatattaaaaataagattgttaaatagttagttactgcgccaccaggcattttgaatgggtgaccttccacttcttcagggtgtaattttctaaaacgtaagtgactgaataaaatcataaaccaaggaatcatacctggtaaaatagacgcactataaacgtatacgaaaatactcttcgctccatcgatatataaaggtaaaattacatttaataaagcaccaattaaaataccaagagatactgcaacaacagtgtacaatggcacaccatttctcatgattttagtaaatattttcggcatttcacctttatgagcaagtgtataaatcatacgactcgcactgaaaatacctgagttacatcctgacattgctgcagttaatacgacaaagttaattaatccagctgcaaatgtaataccgattttagcaaatgttgcaacaaacggacttccaatgtctcctaattgattccaaggatacactgaaacaataacaaaaatagcacctaaatagaaaattaaaattctccagataacaccattcactgctttaacgatatttttctgaggatctttagtttcacctgcagtaatacctatcagttccacaccttggtatgaaccaattacaattgataatgcaaagaagaaaccaacaataccatttggcataaatccgccatttgtccatagattagaaatacctaccgcatggccaccatttccaaaaccaaagaaaataagaccaaaaccagcaataatcattaaaataattgttacaactttaattaaagcaaaccaaaattcaaattctccaaacgcttttaccgagaataaattcgctgccattaataataaaatagcaataacaccaggaatccaagttggcaattccgggaaccaaaacttcatatattctcctactgcgatgacctcactcataccaacaacaatccattggaatatattactccatgctgtcatataacctgctgcaggatgtatataatcacttgcaaatgttgcaaatgatcctgttgtagggtttaaataaatcatttcccccattgctctcatgattaaaaataaaaagatacccgcaattaaatatgcaaggataactgatgggcctgtccatttaattgtacttgtcgcacccatgaaaagccccacgccaatcgtaccaccaagtgcaatcatttgaatttgacgggcactcaatcccctttgtagttcattgttctccataacttcttaccccatctctgattgatactaaataaatccataaaaaaacttattgccgtaattatactataaattatcgattttggtacattaatatttgcataccatgcaatcgtttacagaactactatagcaggcttttgcaactttgcaaacaattattttgtgatttttctaaaaaaattaaaaaagttgtccaagtaccgttgagtcacatacaacttcagctattctcggtaattatgatataattttaataatattaaaaaggagtatatcaatgttaaaacaaatactgccacgtgctacaaaaatatcggtaatctttgctgtagcatttttcatcataaattatatcggtatggaaaaacctgacatcctatatttagttggaagaactattattgcaacacttgctttcatactcatttgtcttacattatttactattattaattctccagagcgcaagattaaactcggtacgactttaccgattgcattaattattggtatcattttcggcgccatatttttaacggtacaaatcggtgtcatcactgggttaatcatcggtgtgattgctacgtttatttgggaattgattgaaaaaaataaaggaggtcgttcatcatgacaacagcattaattggtgtaattgtattaatcttactaattattagctttgtgccaaactaccgtgctatgaaatcagcaaaagaacaaggaagtaatgcaacaagagctacaattatggtaggcatagatattatcttaattgtacttatcatcgtgacgttattattaaaatatatgtaactatttaaaccaccctatctcatacataaacatgaacgttctaccatttcacatacatatggtcgtccatttaatgaggtaaggtggttttctcgttaaagtttaccttgtaatagtaaaaaatagccacttgttgcaagtattaagtaaatcattgaaccaacaacaaaagatcttacttgcacgcgaaatggtgtctgtttgttaaatataggaccaatcaccaaatttccaacgcctaaaattactggaccagctagaaaaaacaatataatgtaacccatcatgatacgcctcctatttcgtaaagaaacgcgctacaatttgatcgtaatcaatatcttttgctacataatctacattagaaaagtcctgtgcgcttgtcattttattcgtattaacaataacatctaatccagctgcaatcgcggctgttgcaccatttacagaatcttcaatagccaaacattgtgtcggcatataatttaattgttgtactgcagataaatataattcagggtcaggtttaacttgttcaacatcttctctaccaacaactacctctatatactcgtctagacctaatgctttaaaggtaggcaatatttccgctttcacactacttgtggcaatcgccataggaatgtgacgttgctttaaaaatgccatcaatgatttaatcgtatcaatcatcggtaatgttgtactagtaagatgatgttcttcataaagtttatctttattttccgaaccaatcgctttaattaaatggtcatgcaaatctgtagctgctcctccaatagaagaacgataaaaatcaatgcttataggatcggcattatgcatctctagatgtttattaataacattaaataaatgttgttccgtatctattattgttccatcgaaatcaaatataactgctctatacatatatttactcctctattttttctctttatcaaagcttaacacagtccgatgaccacttcattctattagtgcaattataacttttttgaccaatactttgctaaaataggccctgttatattatgaatgaaactaaacactgcgcctggtactgctgcaattggattaaaatgcaatgctgctaatgacacagctaaaccagagttctgcattccaacttcaatactgactgctttttgatcttgtcgatctaattttaaaagacgagctaaccaataaccaatcgtataccctaatacgttatgtaacataactactaaaaatattaataatcctgtagttaagatttggtgcttactgccacctacaactattgctaaaattaatgaaatagcaacaactgatataatcggtaaagctgtagaagctttttcagcaattttacgattaataatttgcaaaacaatacctaaagcaattggaattaatacaacttgaacaactgaccacaacatactcaagaaagatacttccaaccattcatttgcaaatagatatattaacgcaggtgtaacgaatggcgctagcaacgtagagaccgtcgtaatagaaacagaaagtgctacgttagctttggctaaataactcattacattacttgatgtcccacccggacaacatccaactaatattacgccaacagcaatatcaggtggtaaatgaaaagactttgcaattataaatgctaatgtgggcataatactgaattgtagacagacaccaataattactgctctaggtgctttaaagaccattttgaaatcattaggtgtaattgttaatcccatacctaacataacaataccaagtaaataaggtacccacttacctaatgtcgcaacatgttgtgggaaaataaatccaataacagctgctactaacatccataccaaaaaactcttcgtggcaaatatactcaatttttgaaacattgttaacacatcctcgtcgataatattgaaaaatattaccataagaccagtaaggttacaattacttttctgaaaattaagattatttggccattctcttcttcttgcaaatattttatctctgataaacaattattttaaacttcattcaaaagtcttagtgaataaagaaaaaaagcgtggtaaaatcaacttgaactaaattaagtcacctttataaatattaaacgtgtatttaatgccatgtattcctcgggaggtcctcacatgttaattgataaattcgaaacatacatcatcaacatcgccggtttaaatgaccgtactactagaaaaaaattaagtaagttatgcaaaagtgtacaattttgtgatgcgttgcaattctcaataaacaaacagtttaatcagtatgtattagaaattagcttaccaaagcaacaacttccatacttcatttcatttttaagttttcatcagtatagtattttccaagtactttcaccaaagaaaataaatgaattacttgattctgataatttatatcaatctgcaaagcgtttcgatatcaatattgatggcttgcaagatgctttcattaaagacaaagttatcgatattatgaatatgttccaaaatcacactgatatcacttatacgttgaataagtctcatgcgcatattatatgtacgccagaaatattcgctaaattgttacatacgattgcaactagaaatatcgacattctatctgccaattatagatcgtcatctatgagcaaagctcgtatatcataataaaagacacatctatacgatgatcatttacaatgattgcgtatagtgatgtgtcttttttttgtattatttaacttcggacgattgatcctcaaccatttgttcaaatgcttcacgaacttgtggtactgtcatacctactacaacttggatactcttaccactctttactaatccgtgtgccatttgttgatgcgtgaaatattccgtatccgcaactttactttcatcataaacagttaagcgtaatcttgttgtacagttagtaacatctttgatattttctttaccgcctaaaccgtctaggtaatacgcagctttgtcttcgtattcattaccagttgaagcacgtttagaatcttcgctatcaccttttttatttttgtaatcttgcttagaaaataatttaacttcctcttctgttttcttacgtccaggtaatggaatatcaaatttcaaaattaagaatctgaataagaagaagtaaatcgctacaaatattaagcctataacaacttgtgctacataagtgccccaatgttctttcccaagtggtaaccagtttgttgaaataaagtctaacaaaccaccacccatatttcctacaacaccaaatgcgtacattaaagtatccattgatgctgctaaaactgcatgtaaaacaaataagtatggcgcgatgaataagaatgtaaattctaatggctcagtaatacctacaacgactgctgttaatgtggcaggaataagtagtgccgccacctttttacgattttctttaggtgtcgtagcatacattgctaaggcaatacctaaacatccaaatactttcccatttccttgaagcataaagccataagggaattgctcttttaatggcttagtactcttagcaaactcatttaaatgttgtaaccattcagctttcaagccgtgattgactactactggtccaacttcaattggtgcataaataaagtgatgtaatcctgtcggtattaatacacgttctaagaagtgatacaaccatacaccgatatagcctgaagcaatgataaagtgttgcattgagccaataccgtgctgaacagttggccaaataacacaagtaattgctgctaatggtaacatcacaaaaaatgagattgtaaccacaaatgttaaaccttggaatacaccaaccatttctggtaatcgtttactatagtatctattgtgaatccaagtaataatagctgaaataataataccacctagaatattcgtatccaatgtggcaatacctgcaattgattttaaaccaggtacattttcaacgcctttttctaaattagcgccaaacgtatgtggccattgcgttaaaatggcatttataaatgtattaaacattaagtaacccatcaatgctgcaagtgctgcatgacctggtgcttttttagctaaagaaagtgtaaacctacaacaaatacaacttccatatgcgtaaaaataacccagccaccagattctatcactgaccaaaatttaaaccaaaacgtatgttgatctgctaaactccccatgattgtaggatttttaaataatgtcgcaaagccaagcactatcccaaagaaagcgaacattaatactggtacaatcattgcactaccgaaacgctttatcgcattcatcttctattccctccatatcatctttcctaacaatacatctaattagattcatttataaatagatgtcttactatttaaatataatatatagtaaacgcttacacacctacaacgacattgacgtattttgaaagtattttgtataattagattatcttttcatatagtgaaaattttttcacgaccttatatatgacatcgttgtatttgtaatacattcgttttaaacacataatcaaacctatatcaatacacaaatatatataatgacatacaaggttttaatgtaataacgatctatcacacatttattttcaaggaggttgaatatgtttttagatgaacacattaatcgaaactttgataaacttaatgacaatgatttacatatcgctcactttatcaatacacatatagatgaatgtaaaaatatgaaaatacaagatttagcgcaattcacacatgcctcgaatgcaaccattcacagatttacacgcaaattaggttttgacggttatagtgattttaaatcgtaccttaaatttgaaagtaataagacacaccaattaccatctaactctatcgatagtttcaaacaagaaatcgatagtacattcagttatttagaacgcgttgattaccagcttcttactgaaaaaatgcatacagcttcaacaatatatttgtatggtacagggcgtgcacagttaaacgttgcttcagaggcacagcgtatattgttaacgttacataatcatgtcattgtacttcatgatgaacatgaacttaaaatgattttgaacaagagtgaacctaatgatttattctttattatttcattatcaggtgaaacacatgaattattagaagtaacaaacttgcttcaacttagacaaaaatactttatttctgttactacaatgaaagataatacccttgctcaaaaagcaaattacaacgtctatgtatccagtaacacattctacttaactgatggtacagactattctagcttcatcagttatcatatattctttgaaacacttgtaagaaaatataatgagtatttactacataatgatatttcaaactagaaaaaaggaagttatgatttaatggccttgagcctatcataacttccttttatcattttattgttgtgttgatgtttcgataacgtggtacatcttatcaaacatcaattcgaaaccatgcaccatggcatcatgatattcttttttcttttgcttgtattctaaattagtaaatcgtctttctttttcaactaatgaacgataataaaatagcatttgggtgccacctgtttcacgttcaaaaaattctacctcaatgacatcttgtgtttcacttagtccaggcataccgatagtcatcttaacgtattcatccataactaaagattcataaataccttcaatcacatttactttgccattacgttgttgatctacaatacgatatttaccgccttctttaacatccgcttcaatctctttattcgttctggctgatgtcataaaccattgtttcaacaaatctttctttgtccaagcttcgtatactaactctggagaaaatttataaagcttttcaatttcaacttcgacatgttcattctctacattaaattttgccactgttgtccacccactttcgctcttacttttattttaacgtatttttgctcagttccaaacatagatgatcatcatttttaaaagattagcgttatacggtgagtacaacatgatctgttaatataacaagccaccttacttggctagatcgatatattgttaagcattaatgtttcatttcttgactagtgttctttttttagctttggaaaattaaataaaatcgcaataagtccgcatacacctaataatataggataaatgctgtatgggaataacattaacggtgaaataccagccacaccagccgctgaaatgacttgcgggctatatggtaataaaccttggaagcagcctccaaatatatcaagaatacttgctgatttccttgaatctacatcatattcatctgcaatatttttagctaaaggacctgacataataatagagatggtgttgtttgccgtggcaatatctgcgacacttaccaaactcgcaattcctaattctgcgccacgctttgatttcactttagagcgaacaaattgcaacaaccattcaataccaccattgtgttgaataataccgactaaaccaccgattagcaacgcaatcatagcaatatcttccatgcttataatacctttggacactgcatctagtagccccatccaaccgaatgaaccatctatgagaccaatgattccggctaataatgttccgccaatcaatacgataatgacatttacacctaataatgctaataccaatactaaaatatacggtacaactttaattagattgtaatcatagtttttagcatgatttaaagaaatgccattcgttaagaaatacagaataataatcgttaaaatagcacctggcaatacaattttaaagtttactctgaatttatctttcattttcgtatgttgtgttctaaccgcagcaattgttgtatctgaaatcattgatagattatcgccgaacattgcacctccaacaactgtagccattgctagtgcagttggtacatctgtcgcttgtgcaaatccgtaaccaacaggtgctattgcagcaacagtccctactgacgttcccatagatatagaaacaaacatacaaatcacaaacaatcctacaataattaaattttctgggattaatgatagtcctaaattaactgtcgactttacgccacccattttttcagctgtatttgaaaatacacctgctaaaataaaaatcaacatcattaaaataatgtttgaatggcctgcacctttcgtgaagacctcaacttttttagcaaatgattcttttcgattcattaataacgccacaattaccgttatcgtaattgcaacatttaatggtattgaagtaaaatcacctgtgataatacctacgcctaaaaacaacgccacaaataataacaaggggaataatgcccaagcattgctctttttatgtacttccatcctttttacctgctttccaattaaaaatacctctttctcacaaacgatgaagaaagaggtttccatgtgctttacctgcttatcttcaaaccattacggttactggaattggcacattcgagatgttgccgaggcttcatagggccagtccctccacctctctagataagtgatgcttatttacgtttacgttacaagataatccttagtacgtcaatcataaattaatcaggagtcgtataatatttttcataaacaatcattgctactgtaataataatcaaaacaataatgctaataacaagtaaaagccaccatttaagcattaatgcaataaaaatgaacacgatagacacacttactaatattaatgatatgactttaaattgctgtgcgctttgttcagaaataacttttagctgtttgtttgatggacgcgtatttttaaaattaatacccagtacaatttctaatattgtaatcgatacgatacttattgcaaatataataaatgatataaaattatagtaacctataatagttgctccataaataacgattccaatgtagaatactcctgagagcacacccaaaaagtaagcaacacgtttgttaaacttaatgatattctttttaacgttttgatgtgtaagccatacattcgaaacaatcgcaaccactacaaacagtgtgaatactatatataatggcaacttttgttcaggaaaaacagtcgctattccaaaagctaatgctaaaatcaaaaataatatagctctagatactattaatgccataataacaacacctttgtttaatatcgagtttgcaaatttacgtttatcagcatttctatgatcagtacttctacgggcagcgtttctatgtaatttacatcatcttatcatataaatacttcgctatataattgaaaacatatcccattattctttgtccgttctggcgtctaatatctaaccttagccatttcacttgttaatgaattgaactttcttccactaaccgtccctaaacccaatcccgcaacagtttttaactttttcgttgttgtcctgacatcctcattaagaaagtttattctgcttaaaacttataatccacaccctgagcaaacgctccttatgacagggtattaaaataagccgataaagatacacacctttaccgactatttaaaataaacttcactaattcattttaatttacttgattgaagtagctaaattaatattatgttgttcaattaaaagcttcatacaaacctaatctatttgcactccaccgctaacaccgaacacttgtccagttgtataacttgattcttctgacgctaatagcacataagttccacataactcaacaggttgacctgcacgacctaaaggtgttttttgaccaaatgttgggattttactttgaggttgtccaccagaaatttgtaatggtgaccagaatggaccaggcgctacacagttcactctaattccttttggtcctaattcttctgaaaaacttttagttaatgaaataattgctgcttttgaagcggcataatcatgaagaataggactaggattataaccttgtacagatgatgtcgtcgtaattgacgcacccggttttaaatattccaatgctttttgaactgtccaaaatagcggatagacattcgtttcaaatgtttctgtaaatgcctcagttgtaaatccatgaatatcatcatgatactgttgatgtccagcaactaaagtaacattatctaagccacctaattgttgatatgcttgttcaacaaggtcatagttgaactgctcatctcttatatcaccaggaattaacactgccttttggccactttcttcaatcacttggcgtacttcttgtgcatcttgttcttcactcggaagatagttaatcgctacatctgcaccttctttagcatacgcaattgctgctgcacgccctattgctgagtcaccacctgtaactaacattttatagccttgtaagcgttgatgaccttggtaagacgtttcgccacaatcaggtgctggcgtcatttcagattgtaaacccggtacctcttgttcttgtttttcataatccgttgttttaaattttgttctaggatcttgagctgccattttttaacatctccttattcgcttaatggttattatttacccaatcttcctaggaacttaatcatgattacactaaaaattactttcttctttataaaaacaagctcgaattactcatgcaatagtctttttacaaattcaacaaaatactcaggtactttttcaagaatcctttcatccggtttatattgaggatgatgtaaatcatattcactatgagaaccaattaacgcaaatacacttggaaaatgttgactataacctgaaaaatcttctccaatcgtaagcggctgttccatcatttccaccttatatccaacatgttgggctactgctattgctttatgtgtcaatgcctcatcattcatcacagcgccaggtaaatgtgtataatttaaattaattttcatattatatgcttgagctaatccgtccgcaatatcttgtaatcgtgtttctacaagctttcgcaccacaggatcaaaactacgcactgtgccttgtacatacgcatgatcagcaatgacattccaagtattaccacatgatatttgcccaattgttactaccgcttcatgaaacgcagataggtttctactaactatggattgaatactattaatcaattgcgccaacacaataactggatcgttacattgttctggctttgcagcatgaccacccacgcctttaatatgaaactcaaaacgatctactgctgatgtaattgcccctgttttgattgcaaatgtacctaacggacgcgatgggtcattatgaaaacctaataccgcttgtacatcttttaatgcatgtgtttcaataattttaaaagcgccatatcctagttcttctgctggttgaaaaatgaatttaacacgcccagtaagagtgccctcaatttcttttaactttacagccgtagccaaaatactagccatgtgaatatcatgaccacacgcatgcataacaccttcattttcagatttaaaatcctgttcaacaagctcttgaatcggtaaagcatcaatgtcagcccgaacagctatacaactcggtccttgtcccacttcagaaacaagcccagtcgcaagtggtaagtctaatattctaatatgatgttctgttaaaatatctttaattttttgtgtagtcttaaattctttatcggatagttctggaaattgatgaaaataccttctccaggcaacagcttgatcttttaatcccatcggtcattctccttccttaagtcaataatatgttgtctaccctacgatgatcgcctttgactattaaacgatgatttcacaacaatgtactcttgttaattactttcgctaatgatagacaattgtttaataatatcgtaacactattgtcaaactattctaacttttataactaagaatctatacaaaaacatgttctcggataaacttgttttcacaaatcacaaaaaagctctaaacattagtgtaaatcaatgcttagagctttctaattattttatgctttaaaagataatgtgttatctacgatgaccttaccgtctttaataactttttctgcgtgattgataccaaaatggtatggaatatattcatgatttggtgcgtcccaaattactaaattagccttatcacctgtgttaattgtacccgcgttaatgtctattgctttagcagcattgaccgtaacagcattccaaacttcattaggtgatagctttaatttcaaggctgcaatcgccataacaagttgtaagttgtttgtgacactactaccagggttataatcagttgctaatgcaatcgcaccgttattgtctagcatgcctcttgcatctgcataatcttctttacctaaatagaacgtcgttgcaggtaagaggacagctacagtatcactatttcgcaacttttcttttcctttatcactagaagctactaagtggtctgctgatattgcttgttcatcaattgctaattccagtccgcctaacggatcaatttcatccgcatgtattttcactttaaaacctgcttctttggctttttgcatataatgttgcgattgttctattgtaaatacacctgtttcacagaaaatatccgcaaaatctgcatattgttttacttctggaagtaacgcaatcatttcttctaaaaatgcctcatttgaacttgcctctttaggtacagcatgaggccctaggaaagtatgtttcatgtctaaatcatatttctcagctaaacgattagacactttcaattgcttcagttcattttctctatctaatccataaccactcttactttcaactgcaagcacgccgtgtttaatcatagtaagcaaatcatgctctgcttttttaaacaagtcatcttcggatgtttctctagtagcattaacggtagataatatgccaccacccatttctaatatttcaaggtaagacttaccttgacgttttaatgacatctcatgttctcgagatccaccaaatgttaaatgggtatgagcatctactaatgccggagaaactacttttccactagcatcaatcgtctcagtcgcatcgtagtcatctgtatgttgtccagcatatacaattttgccatctttaatgacaactgttccatttttcacaacatttaattcatctaattccttacccttcaaaggtttatctgttgatctcggtaaaattaattctgctatatgattaattattaaatcattcattacttatcacctgctttatcaatcattggaatatgaatacctttttctttagctgtttgaatagcgatgtcatagccagcatcaacatgtcgggcaacacccatacctggatcagtagtcaatacgcgttccaatcttctttcagcacgctctgatccatctgctacaacaaccatacccgcatgaagtgaatatcccatgccaacaccgccaccatgatggaatgaaatccatgaaccacctgcagctgtgttaattagtgcattcaatacagcccaatcaccaaccgcgtcactaccatctttcatactttctgtttcacggttaggactagcaactgaaccagcatctaaatggtctcgtccaataacaattggtgctgaaatttcaccgtcacgtacaagacgatttaaagctaagcccattttcgctctttctccatagcctaaccaagcaatacgtgatggtagtccttgatatgaaattttttcttcagctaaatcaagccatcttaataacttttcattttctgggaaaagtttgcgcatttcttcatccgcacgctcgatatcttttggatcaccactcaacgcagcaaagcggaatggccctttaccttcacagaataatggtctaatgtaagctggtacaaaacctgggaagtcaaaagcatttttcactccgttattgaaggctacttgacgaatattgttaccataatcaaatgctacagcgccacgtttttggaattcaagcattaattcaacatgctttgccattgaagcttgtgacagttcaacatattttttcggatctttttcacgcaatactttcgcttcttctacagagtatccttgtggcacatatccatttagcggatcatgtgcacttgtttggtcagtaataatgtcaattttaaatcctttttctagaatcgcttgatggatgtctacagcatttccaactaacccgattgataatccttctccacgttctttcgcctcttctgctaattttaatgcttcatctaaatcagctgttttaacatcacagtatttcgtatcaattcgcttatcaacacgtgtttcatcaacatccacgcaaattgctaccccatgattcatagtaattgctaacggttgcgcaccacccataccacctaaacctgctgtcagtgtaacagtgcctgctaaatctccattaaagtgttgattacctagctcggcaaatgtctcataagtaccttgcacaataccttgagaaccaatatatagccaactaccggctgtcatctgcccatacatgattaaaccttttttatctaattcattaaaatgatcccagtttgcccattcaggtactaatattgaatttgaaattaatacacgtggcgcttcttcatgtgttttaaatacagcaactggctttcctgattgtactaacattgtctcatctgattctaattctcgtaacgttttctctattgcttcaaaagcttcccaattacgagctgcttttccaataccaccataaacaactaaatcttctggtctttcagcaacttctgggtctaaattgttgtataacattctaagtactgcttcttgttcccaacctttacaatcaatactcaaacctttttttgcttgaatttttctcataaaattcgctcctgttctttttagaagttaattccactaaatttaaagcgcttacattattatcttcaatactcattatagtatgttaaaatatagccaacaaatataaataaactaattatccatagcttgaatctataaataaaaggagcaaaacacatgaaaattattcagttagaatatttcttggctatcgtgaaatataatagttttactaaagctgcacaatttttacatattagccagccatctttaactgctacgattaaaaaaatggaagcagatttaggttatgacttatttacacgttcaacaaaagacatcaagattaccgaaaaaggaatacagttttatcgttatgcgagcgaattagttcaacaatatcgatctacgatggaaaaaatgtatgatttaagcgttacatcagaaccaaggataaaaattgggactcttgaatctacgaatcaatggattgcgaatttaattcgaaagcaccattccgactaccctgaacagcaatatcgtttatatgaaatacatgataaacatcaatctatagagcaattactgaattttaatattcatttagctataacaaatgaaaaaataacccacgaagatataagatccattcctttatatgaggaatcttacattttattagcacctaaagaaacatttaaaaatcaaaattgggtagatgttgaaaatttgccactcatattgccaaacaaaaattctcaagtgcgcaaacacttagatgactattttaatagaagaaatattcgtccaaatgtcgttgtagaaacagatcgattcgaatcagcagttggatttgttcatcttggtttaggttacgctatcattccgagattttattaccaatcatttcacacgtccaatttagaatataaaaaaattcgtccaaacttaggccgaaaaatttatatcaattatcataaaaagcgtaaacactccgaacaagtacatacattcgtacaacaatgccaagattatttatatggacttttagaggctctttaacttaagtaattagagcctcttatgcagttgctcagtcaactgtataccttttgcctttaacttaagttattagagcctcttatgcagttgctcagatcatcgtataaaaattaatgacgtcatttcaaaaatcgatacacaaataatttattataaaaattctaagaaagaagtgaaccagatgttaaaatctattaatcatatatgcttttcagtcagaaatttaaacgattcaatacatttttatagagatattttatttgggaaattgctattgactggtaaaaaaactgcttattttaagcttgcaggcctatggattgctttaaatgaagaaaaagatataccacgtaatgaaatccacatttcatatacacatatagctttcactatagatgacagcgaatttaaatattggcatcagaggttaaaagataataacgtgaatatcttagaaggaagagttagagatattagagatagacaatcaatttactttactgaccctgatggtcataagctagaattacatactggcacacttgagaacagattaaattattataaagaggctaaaccacatatgacattttacaaataaggcgtcattataaaaaggcctcttgaattccgttaaaattttaattaatcattatataataagagaacttttcatacaatacagttgttatttttgctatttcaaataacataaataagcagtaagatgactacaacttaagagtcttcttactgcaattatttttcaaatatatcaacgttaatataacttctattacgaaatactcacattctgccctgcaatgcaaatttcgtcacatataaatatttttaattattttaaaaaatgatgcactaaattagcaacgagctttgcagttctattgtcagcgtcatatgttggattcatctcagcaatactaactgaagacaccttatcacttggaataatacgttttgccaattcaagaacagtatgtggatacaaacctaacactgccggcgcacttaccccaggcgcaaacgcactatcaatgacatccatacaaatcgtaaacataatgacatcatgttcatgtacaaaacgctcaatcatatctttaattgttggtgatacgtgactcaataattcatctgcaaagacataatcaatctttttctctttagcataatcaaataaactttgcgtattaccaccttgagcaataccaagcactaaataatctgtgttttcatcttcttctaaaatttgtctaaagctcgttccggatgtagattgttgttcagcacgtgtatcaaaatgcgcatcaatatttatcacaccaatagattgtgttggatagactttacgtgttgctaaatattgagcatacgcaatatcatgtccaccacctaataaaaatgtttgtctatgattagcaattgacttcgctgcaagcatagcaaattctttttgagtatcaattaattcctcatgatcatgataaacatttccgtaatcgactaaagtttcaaattgattcaaatccggcaaacctgcaaatgcttgtttaatcgcatctggtccttcttttgcaccaatgcgccccttgtttaaagcaacaccttcgtcaacagcatagcctaatataccgacccctgatggcctactactcttttccagcttagacaaatcttcaaatgttactgtttgaaaatgtctaaattttttcgggtctgtttcactatctaaccttccagtccataaatttggttcaccttgcttgtacacagcatttccccctcttatttatgtggcttattaacaattaaagtataacgtataggaaattttgaattcaattcatagttaaatccatatcttaaaaatacttatctacatttcttttacccctattttctatgtaataacgaatacttagctgatttatgttaataaaatacgtcaagactattacattttcattaatattgacatagacaatttatctctcggcttgtaatatgtataattgttactaaaagatattttgcttgttacctaatggaggttacatataatgaaaaacaataaaatttctggttttcaatgggcaatgacgatttttgtcttctttgtcattacaatggcgttatccattatgctcagagatttccagtctataattggtgtcaaacactttatatttgaagttacagatctagcaccattaattgctgcaatcatttgtatactcgttttcaaatataaaaaggtccaacttgcaggtttaaaattctcaatcagcctgaaagtaattgaacgtctattgctagctttaattttacctttaattattctaattattggtatgtacagctttaatacatttgcagatagctttattttattacaatcaacaggcttatcagtacctattacacacattctgattggacatattctaatggcgttcgtagtagaattcggattccgttcatacttacaaaatattgttgaaacgaaaatgaacacgttctttgcaagtattgttgttggtttgatgtattcagttttctcagcaaatacaacttatggtacagaatttgctgcttataacttcctttatacattctcattctctatgattcttggtgaattaattagagcgactaaaggacgtacaatttatattgcaacgacattccatgcttcaatgacatttggacttattttcttgtttagcgaagaaatcggcgatctattttcaatcaaagtcatcgccatttcaacagcaatcgttgcagtaggatacattggtttaagcttaattatccgaggtattgtatatttaacaacaagacgaaaccttgaagaacttgagcctaataattatttagaccatgtcaatgacgatgaagaaactaatcatactgaggctgaaaaatcttcttcaaatattaaagatgctgaaaaaacaggtgtagctactgcatcaacggtcggtattgctaaaaatgatactgaaaaaactgcggctgacgaaccaagcattcatgaaggtactgaaaaaacagaacctcaacatcacatagataatcaaactgaatctaatcatgatgaacatcatgacatcacttcggagtcagtagaatcagcagaatcagttaaacatgcaccacaaagtgacgatttaacaaacgattcaaatgaagatgaaatacaatcattaaaagaacctgcgacttataaagaagacagacgttcatcagttgtaatcgatgcagaaaaacatatcgaaaaaactgaagaacaatcttcagataaaaacaaataataacaaagcgcttgctagtacctcttaagaagatgatgctagtaagcgcttttctatgctatatattatttttctaaaattttaacaccttcttgagtgcctacaataacttgatctgccatatctaagaagtatcctgtctcaaacacacctgtcagatgaattaaatactcatggaacttatatgggtcaattccttttggtaacttacaatctaaaatataattgccattatcagttataaatgcgacatcttcgtttacacggcgttctacttttatatcagcgtatgattcaattttacgtaatatgtgataccagttaaatttatccacctctactggtaacttaaacgtctcacctaagtattgaaccattttcgtttcatcgacaaccacaacaaaacgcgatgccatttcatctataactttctctctgaacagcgcaccaccgccacctttaattatatttaaagatgggtctacttcatcagcaccatcaattgctaagtcgatatgatcaacatcattgatttcacatattttaatacctagttcttttgctaaaaatgcaattttattagaagtgcatacacctgtaatattgtaaccacgttctttaattagttgcgccatttgaggtaaaagtaattccattgtacttcctgtaccaattcccagcgtcatgtcaccattgatttgacttaaaacatcatttaatgtcattaacttaagtgctttgacatctttcatgaaggtagcctcccatatttatgtaatctattcaattcatattttacatgactcatataaattaacatacccttatttctaacatttttttaaacatatcaatcagaatttacaattctaaaaatgttttatagtacaatatactttaacttaacgttaaggagaatgatatgatatcaattcacgcaatttcgacaggaaaaatccaagatttgccttatagctcgaaaagaccgatgcgctctgctttagataaaactaagatttcacaaacaacatggttatcttcaactggtttcactggtgatgaacaggcttataaagatcatggtggaccacataaagcagtttgtgggtttagtaaacataattatgcactgtatcaagatgatttaccttcactacctactcatgcgatgtttggagagaatttaacatttgattatttagacgaatctgatgtttactttggtaatcaatatcgtttaggtgaagcgttaattgaggtttctgaaattagagaaccgtgctggaaaattcaagcaaaatataatattcctggtttagtgaagcgcatgtctacatctggtaaaacaggtttctatttccgggtattaaaacaaggctatgtatctccaaatgatcagctttacttaatacaagaagcaccaatcgaacatcgtttatctgtacaacagcttaatgacctttattataatgatagacaaaatcaagatatgttacgatatgcactaaacaatccatttctgtcaccaacaagacgcgataaacttcaaaaaatgtataacagaacattgaaataattacctttcattataagtgttaaatgaacttttcaaaacaaaaaggaatcaacttacacatcgtttgtataatagtcttatctataactactgatgctattgattcctttttaatgttatatattttctttatttcaaactgtatattaatgatgtcacttcatttgatacgattcttgataacctattcaaaattccgccaaataacataaatattatataaatgccgatacttttaatcattttctactttttcttcgatacggaaacttgttttcgaattgaacacttcaccagcttttaaaattgacggtgctttttcaccatataaattaatatcatttggtaaaaattgtgtttctaatgtaaagccagaatgtggtttataaatattaaatggactatcccactcatcaggctgattaaaagtaaagaatacaacatgaggcatatctgtatcgacctctaacataaattcatgattttcaacatacattttatgttcaccaactgtaaatgggtgatcaagaccaccaaaacgtgtcatttgttggcttaattgcgcatgttgtgatgtaaaaatatcactcaattttatcttgttatcttcaaacacttcatgtaaatctagaatatcacctgtaacaatatttcgctcatctaatacatacatatctaattgattacttgaaatgcgatgattatcaacgacattattatctcgattcaaattgaagtacacatgattcgtaggactaaacaatgtgtcttctgatgcaactgcttcgtattcaatcgaccattggtgatccgcatcataaatatgtgtaatcgtcacatcgatatcacccgggaaatgatcatcagctgatttcaacaccgtcttaaatatcactttaatttgagcaatttcatttctaatttcataatcaaataacttattgtccaaaccatgacatccaccatgtaaatgatgttcgccgttgtttttttctaactgatattctttacctttcaacttaaatttagcattatcaattctaccgctatatcttcctatagaagcaccaaatttaaaaggattactatgataaaattcatccgcttcaacaacatttccaagaacaatattattatcatgatatttccaagacactactcttgctccataattcgtaaaaataattttagtttcatcattatcaattttgattaaatctacaccttgtctttggtgctcaacttcaactatcatttttacttctcccttctaaccacaagtgttcaagctctgctgggtagcaacattactaaaacacctacaatacaaatgattgcaccgataacatcatatttatctggcatttgtttatctacgaccatcgcaaaaatcaaactcatgatgataaatacgccaccatatgctgcatatactcttccgaatgatggaaatgattgaaatgtcgcaatgacaccatataacatgagtatcgcaccgcctattagcccaacaagtgaagactgtccttccctaagccacagccaaatcaggtatcccccacctatttcacataagccagctaatataaatataaaaatcggatataacatgaaatcactccatcacacatttgctaccaataatctatcggctacatatcattcgtttacatttcttcttacttcacattcccattttaaaaagttcgttttcacattcatattgtacacttttttagacattattctatagctaaatataaaaaaataagagtaacacgctttcatcatcattttatatgataaatgtgtgtcactctcatcaattttattttttaaatacacgtttcattgaattaaataagccacgttcaaatgtaagtactgaatctttatatgttttaattgcaatccatatcaagacagctaccattacaattgagattaatgaacttaagatgacctcatgtatttgaagccctgaagtttgagcgcgtacaactaattgaaatggcgctaaaaacggaatataacttgtgattaaagcaagttgcccatcaggattatttatcgtgaatatcgcgatataaaatgcaatcataccaagtaatgtcagtggcatcaaagattgatttaaatcttctattctagatgttaatgatccgagaatggctgcaagtaatacatacgccataattccaacaatactacttataattccgacaataataatttgccaagacaattgattcatttccacgttaaaaccttgtagcaagtcttttaagtcaaaggcaaaaatgcatataactgccatcaatacaattaaaataatctgagtcacggcaactgctataacgcctaaaattttagcaaaaatatgttggattggtgaaatacttgtaataatcatttcaatgacacgcgatgttttctcactagcaatttccatagctatttgagatgcataatttaaaacaataaagaacattagaaagataatgccataagctaaagcatagttgaaaatcttttgtccttctgatactttatcgacttcatcattagaaatcaccttattatcaactttactttgtgcttgtaatttttgtaagtcttctttgttgatatttaattccccggctaccatatttgtttgaatagctgtaagcagtgcttgtactttttgtgaatcttcatgacttactcgcttctcactaatgattgtcccttgtaacgtgcgattttgattcaccttgataatataagctttatcaagtttatgtttttttacttctttttcagcatcttctatagaaactttagtaaacttagcatcactatgaaatgtattcgcctgttgcttgaaaaccttatagatttgttcattcggtgctgctacaccaattttatctggaccatcatcaaacatgttaataatcttatcaatgttagataggccaatcattaaggcagcaataataatcataaaaattacaaatgatttagctttaatttttttgatatatgtcaaactaaatgtcgcccaaaacttatgcatccttgccaccaaccttctcaatgaatatatcttgtaatgatggttctacaacttggaatcgtttaacataaccttgatgtgctacaacttgataaatatctttggctacgtcttcattctcaatcgtcaactgaataccttgcttcatgttttcactatgaatgatgcctctaatgtgtgttaaatctggtagtgttgtttctgactcaatgacaactttcttgttaccattagatgcacgtacatgattgatatcaccagaaacaacaagttgacctttatctaaaatacaaacatcatcacataattcttcaacatgctccatacggtgagaactataaacgattgtactgccccaatcatttaagtctttaactgcttcttttaataactcaacattaactgggtctagaccactgaaaggctcatctaatattagtaattctggtttatgtaacatacttgctaacagctgaattttttgttgattcccttttgatagactatcaattcgttttttacggttttcagtaatatcaaagcgctcaagccaatacgatatttgctgttgtatttctgtttttgacattccctttaaagttgccaaatatttcaattcttcttcaactgtcagtttcccatgtaaaccgcgctcttccggcaaataaccaatacgattgtacattgttttatctagttttttaccgttatacgtaatgtgtccttcagttggttcacttaagcctaaaatcatacgaaatgtcgttgttttacctgcaccatttcttcctagaaaacctaacattttgcctgattctaactctaatgaaatatcatttactgccgtcatcttgccaaaacgtttcgtaacatgttcaattacaagtcccatactttgcctcctaaaacaatatgtatttatcttaatttaacatttctattctctataaatgcaatatttttaaagtgaatttatttttaaaatttctgaaattgaaatatttaaatagtatcttctttgcatgttaagtatcattagctttaactactcattttccatgcctttattgccttattcgtaaaaaaatatcccagcatcattgtgccgagatatttatatccttacaattgattatctgtttcttccggtgttttcggtgtttcagatgtacccgctttttccggtgtttcagatgtcactggttgatttttaattgaagatgggtattttgggctttcgccatatttatttgccggcttactgtcaaagcataggaatactatcattgtaactgtaagtccaaaataaataagatatagaagtactaacaaaataacaattccaattggcataaacataaaatcattatcataatatgattcgataaactgcaccactatagagaatacaatactaaatgcacacattataataggcaataccattgttcttgatatatcgtggaatcttcggacgcttaatgccaaattgggaataaaggttgctaaagaataaagaagcatatatataattgtaagtattaatatcatcacaccaaacatagataatactttagcatctatttcatcacctatacccacaaatactgctcccataaagaacacgaagaacgcaggaagtataaatattaaatgccacaacatcatataccaatattcactacgtcttgatctccccttaaaatttacataatttttccaaaataatacgaatgatttcataaaacctacttgaggtaattgttccattgtaatctccctttcgttaatcatatttatatttttaattattattaccgttataatttacaagattcattatcaagccacttcatttcaatcgtcattcactttggaaaatgaactttatatttcatcactagttaaatgaaaacccgctaaaagtacgcatctatatggagactcatttgaaagtcaacgcttcgttaactatactaaaaatatgtcacactgcaatgttcacatttaaaagagtctcaatctctgcaaataaaatattccataacaaagtatatactttacatttttataattcttaacaatactattttatcaaacatttgccacaataaaaatatctttttcatttttatttaaattaatcatataattgcgaggagaatattatggatttcgttaataatgatacaagacaaatagctaaaaacttattaggtgtcaaagtgatttatcaggataccactcaaacgtatacaggctacatcgtggaaacggaagcatacttaggtttgaatgatcgtgcggctcatggctatggtggtaaaataacacctaaagttacgtcattatataaacgtggtggtacaatttatgcacatgtcatgcatacgcatttactcattaattttgtaacaaaatctgaaggtatacctgaaggcgtacttatccgcgcaattgaaccagaagacggtttatccgctatgttccgtaacagaggtaagaaaggctacgaggtaacgaatggcccaggaaaatggactaaggcatttaacattccacgggctatcgatggcgctacgttaaatgactgtagattgtctattgatactaagaatcgtaaatatcctaaagatattattgctagtccacgaatcggtattccaaataaaggtgattggacacataaatctttacgttacacagtgaaaggtaatccatttgtgtctcgcatgcgtaaatcagattgtatgtttcccgaagatacttggaaataaatgtcatctttgattgattactatcatgaaaatgaaatctatctccttataagtcaatcaatcgtgccgtcaacatgcggatgggttgattgtttttctttgtgtccatcatattttttgattcatctcctctttttgaacttgttcttaattataaaatataacaatagaattatttataattattaaatttagatgcattaatattattgatattattttcaaaaactagaaatattgatttgttgcatgtataatgttaaaagtgcccttttataacgcttacatataaaagcttatttagggagagggatattcaacaagggggatttgaaaatgatagaacttaatgcaattacaacattatgtttagcctgtatactttacttacttggtaaagctatcgttaatcacgttaattttttaaaacgcatttgtataccagcaccagtgattggcggcttaatctttgctattttagttgcggctttggattcatttggcatggttaagattaaattagatgcttcattcattcaagatttcttcatgttagcattctttacgacaatcggtcttggtgcatcattgaaattatttaaattaggtggcaaagtcttgctattatactttatgttttgtgctatcatttcagtcattcaaaacatagttggtgtatcactagcaaaagtattaaatattaaagcgttactaggattaacagctggttctatgtctatggaaggtggtcacggtaatgctgccgcttatggtaagacaatccaagatttaggcattgactcagcattgacagcagcacttgcggctgcaactttaggtcttgtatttggagggcttatcggtggaccagttgtaaaatttttaatcaaacgttataacttaaagcctcaacatagtgacgatacatttaaagattatagccaagtagcatataacgaacatttacatagtaaatttaatgccactgaagtattcttcattcaatttacaatcgttgtattctgtatggcagttggaagttatttcagtcatttgtttacagctcaaacagggattaatgttccaatttacgttggctcattatttgtagctgttattgtccgaaatatctctgaaagttttaattttaatattgtagatttaaaaattactaatcaaattggcgatgtcgcattaggtattttcttatctcttgcgctaatgagcattcaattaatcgaaatttataaacttgctatacctcttattattatcgttttagttcaagttgtcgttatgattttatttgctgttttaattttatttagaggtttaggaaaagattatgatgctgcagtaatggtaggtggttttatcgggcatgggcttggtgcaacgccaaatgccatggcaaatttagatgttattactaaaaaatatggaaactcacctaaagcatatttagttgtacctattgttggtgcattcttaatcgatttaattggtgttatagtcattatgggattcattcaatggtttagttaaacaccaaactcataaataaaagaggaggccttcgcctcctcttttatttatcctcgatgtatattcaagctacgttgttctatccatgacaatatttccggactaaatacgatttgtttttgtgttaagtcgtcaatatttttagcatctaacatcgtcattattgatttcatgtgttcaataaatgattctacataagctactgtatgtgcaatgccattattttcaacttgatttaaaaacggacgtgacataccagttgcctttgcgccaagtgctaaacttttaattgcatcgagtggtgtacgtaaaccaccactcgcgaaaactgaaatttcgctttgataagccgttgtttcaagtaatgactcaactgtagactgtccccatgatgataagtaatccatatctttatttgcacgacgttcattttcaatatctacaaagttagtaccacctttgccactaacatcgacatacttaacgcctatttgttgtaagtcatgcattaattctttgctcataccaaatccaacttcttttataatgactggaacagacactcgtgatacaatcgacgctatattatctaaccaagtcacaaattcacgattcccttcaggcataactaattcttgaggagaattaacatggatttgtaacgcttgtgcctcaagtaattcaactgcttccaaagccttttctactggtacgtccgcaccaacattgctaaaaatcatgccttcaggattcatttttcgcgcaatcgtaaacgtctcagccatgcgtggatttctcaatgccgcatgtgttgatccaactgccatcgctaagccagtttctcttgcaactacagctagcttttcattgatgtttttcgtccactcgctaccacccgtcattgcattaatataaaccggatatgccatcgttaagtcaggtgtctgtgatgtcaaatcgatatcatttacattaattgatgggatagaatgatgcacaaaacgcatcttatcaaaatctgaatgcattgcgtcagattgggccattgctatttcaacatgttcattttttctctgttctctttgaaaatcactcatgattaaacctaccttttcgtcatttctaatttaaaaccattttttacgtctgaaaaagatgattaatacgacagctataacaaacattacagctaagcaaatataatatccataatgtaaatgtaatgccggcatatttacaaagttcataccataaatcccagctatgaatgttaacggtgaaaatataactgatactaatgttaatacttgcataatactattcattctaaatgacgtgtatgactcaaaattttctcgtatttcgtttgtcatttcttgtgcagtacgaatgatattacgttgcttaatcaagtggtcatcgatatgttgaatgtatagcgaatgtttattatctataatcaaatcaccattttgtttcattgtatcaattagctcctgcataggaaacagtacacgttttactttaatcaaatccgaacgtaacttaaagacactatccatgaccattttattaaagcgatcatctacatggcggtcttcaaaatgataaacactatcttcaagtgcataaacaaagttgaaatatttatcaaccatcatatctaaaattaatatgacgacatctgcacaatctaattctgcatctaatgtattcatatacttatagactactttatttaatgattccaacgtttgatgatgatatgttactaatacattgtcttgtataaaaatatttagtgctattggtgaatagtttgaccccataatactatggaatactaagtattgataatctttataagatttatatttagctcgtggcataccgttaattgcatcatccacttctaaatcattaaaattaaaatgtgctttaaaccattcattttcttgttcattcggttcatcaaaatcataccaaacaatagtcgcatcttttggtatctctttgatatcatcaactactttaaacggttcgtatgtagtttgataccgtatcgttaaagccatcgatactccccctaaataacgaattctctattattttatcatgaattaaataacgtgtatgtcttaatttattttagtatgatagtcactaaggagatggttattatcaaacaactttttacacatactcaaaccgtaacatctgaattcattgaccataacaatcatatgcatgatgcaaattataatatcatttttagtgacgtcgtgaatcgttttaattacagccacggtctttctttaaaagaacgcaaaaatttagcatatacgctatttacactagaagaacatacgacatacctctcagaattgtctcttggcgatgtatttactgttactttatatatttatgattacgattataagcggttgcatttatttttaacattaactaaagaagatggtacactagcatcaacaaatggagtaatgatgatgggaattaatcagcacacacgtcgttctgatgcttttcctgaatcattttcaacacaaatagcacactattataaaaatcaaccaactatcacttggcctgaacaattaggacataaaatagcaattccacacaaaggagcattaaaatgacagatgcattacaacaaaagattcatatcgaattactagatttattagatgatgttaagtttgaattaacagaattaaatgcacaaaaagggttatacattaacggaccagcaaatcagctacttaagcgtggcgtgcatatggcttatgttcaaggacaaaagcaagccatcgataatattatgactattgtggaacaacagcttgaagatcaacatttcttagaacattatgataaatttcaaaatgaggttgctcatcgcaattatgataaaacagctaactttgcagaacttagtgatattccacgtcaattcgataattttttagatcaattttatcaaattaaagggcaatactttatcatcacgcatatcaatacacttattggtgattttcactcagaagcgcattaacaattagtctatataatccttgctatattttcaaaaacaaaacccaattgcgttttcatgtcaaatatcatcttccatgaaatcgtaactgggtcaattgtatgttattagttgttttgtgttacatcctcatctatcgatttggcaatttgtttaatagctttatgtgattgtctaattggataaattggaaaatcatgtaccatcttaggataatcataaaactcaatgtattgatgatgttgcaacatcatttgttcgaatagcttcatatcaggatgtgtcatttcacgtccaccaccaaacatataaactggtggtaatccttctattgtgccattaattggcgatatgcgcttatctgttaatggtaggccattcgcccattttttcataatctcattgacaccaaactgacttagaaccgcatcttgttcgattaaagcgtccgaaatatctttattagatagtgttgcatctaaaattggtgagattaaatacaatttattcggtaatggctgttgattatctaaaagagattgtacaaaggataatgccagtgcaccacctgaaccatcacccatgactacgacattttgatggcctacttcagatactaattgatcataaacacgttgtatcgcttggaaagtatcgtcaatatgaaactctggtgtctttggatagataggcagtacaacctcatataatgtacttaaagtgattttatccaacaatctccaatggaacggtgatggttgtagtgcattgaatccaccgtgaatatataaaattttcttatcaatttgatgtctgaaattaaagcgaaagacttgcatatcatctaatgataatttttctaaatttgctttaacatttaatgttgaaggctgcttatgtttttttctattttcaatttctcttttataaaaaaatctttcaacatcttgatcatttttaaacataatcgagcgattgtgaagcaaatatttattgacaacgctattcataacacggtttctaatcaatgtcttaacctacctttatatattttatgtatccaatgattgtctatcccctacattctttgccaaaaaaagtatataatgtagaagatattttctttttcactttcaaatttaagactacaattgaacagtgatttttcatcattataacagacaactagacatattgataagtaaagaaaagaactttatacggaggtaccttgcatgacaaatcctaatcaacgattagaaccatttgatgagacatttcaacaaccgaatattcatcgtggtaaacgatatggtaagaaaaaacgttcattggtaagcatgattattcaaatcattgttgttatattaaccgcaatcgctggatacagtatgtggaaacaacccatttttaatattgtcttcaccaaagaatctgtagattttgatggcattaaaaattttaacgagacaattggaaaaatgcatcaattaaatattaatttgggtaatatcaatgatttacaacagggaatcgatcgcttaattttagtctttaacggtttctttattttatgtatcgttagcctagtcataacaatactgacaattgtatttaatcgcacagttctaaaagtagtaaatattttagtgttaacaattatgttagtcattacattgtatttcagttatattattaaagcactcgcacaagaaattgcagatgctttaaaaaaatattatttaaatgtaccaccagatcaagtaataacagaagctgacgctattcataacggcatcattttactgggctgtagcatcggtttacttgttataagcttattcttccgtaatcgcatgcctcgtttaaaataatgttatatagtagggattgggacagaaatgttattttcacaaaattcatttcgttgacccacttcctgctttttctttattaatgacctactacgtcaatgccaaattttaatataattcctctaacattctacaaatcaacaaataaaaaaagtatcgataaccatatattggcaccgatactttaaaaatcatgtccccacaacataatttttgattagtcacacttcaattaatttattttatttattcatgattgatactattatctgcatctatcttttgagccgtagcttttgcttttttgttactttgtaaaaataaacataaaattaaagcgatgatgctaaatatcgttgcaactataaatgcatcattaatcccttcaactgttgctagtttatttacaaattgtaataacactttcattgcgccttcttgaccaccatattgcgatgctaattcacgcatatgatcttgtacaacaggattcgttttatctaactcttccccaaaagctgataaatgttgtgtagtttgcgttgtcattacagtaaccaagattgctgttcctatagaaccagctagttgacgcatcgtatttaagaaggcattaccatgggaggcaagtcgtcccggcaacgcattaatagctgctgttaccattggcatcataataaatgccataccaaatgaacgtagtacatagatgcccatgattgtcatatatggcgtatccatattcaatttagttaattcccatgttgcataagtcatgacagcaataccaaaaatggctaaaggttttaagccaatcgtgtctaacaacttaccagcaaatggtcctagtagacccataattagagaaccaggtaataataacaatccggaatctaatgctgagaaaccacgtaaattttgtaagtaaattggtaataaaatcataccaccatacaagctcatcattacaaccatattaattactgttgttagtgtaaatgttggaaatttcaatacttctaaattcaacattggtgctttcattcttaattctcttattacaaatagaataataaagataataccaatcgcaaacattgtttctatctcaacagaaccccagcctttgttccccgcttctgaaaagccgtataacaaagcaccaaaaccaattgtactaaaaatgatacctgggatatcagctttagggtttgttgtatattgatataacttaaaccatacaaaaccaactaagattgcaataattccgataatgaacataccgtaaaacatcacattccaatggtaattttgtacaatataacctgataatgttggaccgattgcaggtgctaaaatcattgcaatacccattgtacccatggcagcaccacgtttttcaggtggataaattgtaataataacaattgaacctaatggcattagtacacctgcaccaatggcttgtaatacacgtccaaccatcatgattgggaaattcattgaaatcgcacatattaatgaaccaattgtaaagagtactaacgcaactaaaaataattttcgatatgaatatttattaaatagatacgccgtaattggtattaaaataccgtttactaacatgaatcccgtcatcaaccattgccctgttgacgcagaaatattaaattccgtattaatttttggcaaagcaacatttaataatgtttggtttaaaatcgcaataaacataccgaataataatgccgctaatattttaccgcgtgaaacaccttcaccaaaaatatagtttttatgttcttttttaattttctcatttactttatattcttctgattcaggatttttagcagcaaatgcttcatcatccttattatcattgaataattcttgatcttgttcagaccctttcgcatgatcagttagactaacttgattctgattgtctttattgtcaatacgtgcctcttcacgcgccgtatgttgtgacgattgatcagttgttctgtctaaatcacttgctttaaatttagattgatttgattgacgtgtcgcaaaatgttgttccttttgttggcgttttgcttttcttcttgatcttattaatattaaattgataaccccaacaataatgagcgctaaaacaatgtagctaataatgaaggtcgtagtcatttaatgacccccttaatttttatgaatttttacttcagcgttcattccaggaacaacttgtttagacggttctgaatctaacgtaattttaacaggtataacttgagatactttagtatagttaccatcactatttgatgatggcattaatgaaaaactagcagcagtagcttttccaatactatcaactttacctttaacagaagctttttgaccgtcaatagtcacatcaacatctttaccaacttcaacatctttaatatctttttcgtcaatatttgcagttacatataaatcatctaaattgtaagcataagcaattggattgcctgcttgtaccatagaaccttccatgccatctaatttagcaattgtacctttttgtggcattttaagttccatatctttagtttcgccatcttgaccttgaacagtaactgttgctactttatcacctttatcaagtttatcaccttgcttaacatttagtgatttgatttgcccagaagctggacttgctattttaatttgatcgccatttactttagcattatcagttgttatataacttgttgttttattccagaaataaaaaccagcaatcccaattgctaacagtacaacaaccgtaatgacattaattaatatcatctttttcatgaaacatttcctcctatttgcttttaaaattcactttatttattatagagacatgataactaaaaaaacaccaacaatttttataagagtgttggttaaaattcacaaaggtgtaacaatatgaaacgacaagccaaaatagaaattcaaaacgcacttgttgatttgatggctgaatatccttttcaagaaatatccactaaaatgatttgcgcgtattgtaatattaatcgttctactttttatgattattacaaagataaatttgatttattggataccatcaactcaaagcataaagaaaaattccaatttcttctaagcgcgctacatcataatttcgaaaatattaaacaggataagcttaaactttataaattcttcattattattgctaagtatatcaagcacaatgagcagtttttcaaagacattttagttacctatccaatgaaaacattattcatagactatataaatttagcgagagattactatcaacaaattatgaatgactatagtactacagtaaccaataaacagctttatgttacatatatcataggcggtcaagctggagtatttattaattggctttcgaatggttgtaatgaatcacctgaagaagttgctgacattttattggctaatacgattaaacttcaaaaccaataatacggtttcattctaataaagaaatgctataaaacaactagagaaagttaaaccaaatggacagataatagtacatatgtaacggtgctatcaaaataaaaatgccgagatttccacataataatctcggcatttttatttttgatgctaaattcataggtctatgaatagctcatgttttgttttttaatttttcaattcaatataatagaagaaactatgtttatcatcgatttgttttaaataccttcatattataaatctgtaaaacaattaatataactgctgtagctataataataattatgtaaggtataggattatcttcaccttttacccccactaatggcgatgcaataccaccaaataaaaactgcactaaccctaataaacttgatgaactccctctaccactactactttcatccatagctattgtaaaaccaagtgtcgcaacacctgtcactggtgctattaaaatgataaatcctatcgctaaaatccaaaagttccaatgattaagcaatacaatcgtcactaaaattacaccgataatctgaatcatcgtcatgcctctcatcaatttttgtgagtctataaaatcaacaaggtacccagtaagttgacttgatatgatgagcgtaataccaattcctgcaaacatccaactaaattgtattgcagtcatgccataaattttttgaataataaacggagacgcagaaatataagtaaataatattacaaatgtcataccttgaatgagcattggtaatacaaaacgtggcgtcttcaataatattttgaagtttttaaacattgtctttaatccacgacttgactcacgattggtcactgttaatgattcaggtacttttaataaagaacctatgaccatgacgaagccaaagatagtcagaatgacaaagaccatacgccagacagaataatttaaaattatgccccctattgttggcgcaacaactggtgcaataccattaacaagcatcaataatgccataaacttagttagttcattaccactatacatatcacttgctatagctcttgaaataactgctgctgctccacctgtgactccttgaagaaatcttaatgcaaccatcagccaaatattatgtacaaaaacaatacctaaacttgctaatgtaaaaataatcatagctataataagcggctttctgcgcccagttgaatctgaaattggaccagcaaacaaattaccaaacgctaaaccaatcataaacatcgataatgttaattgtgcgttagacgtcgttgtttgaaaatcatgcctaatatctggtaatccaggcaaaaacatatctattgataatgctccaatggccgtcaaagatcctaaaataataataaatatcggtgaacgcttgttaaaatgcgttaaatcattcatatgactatctcctttatataatgattagtttataactatcacgaacagaaactaattttaaatatgctcttttatatattagcattactcacaagtttcatgaacatcattacaacttataaaaggtataaaatgatataaacctcagcactccataaattttttcacaaaaaacaatcccttcaaagtaattcacactaattgtaaatactttgaaaggatgttgtttgtattccatgacacatgcatcttatttaagatttatactctatttttccgatgtcttgattaattgcaagcggtcttgcgaaccttgttcaagctcatattctttatctacttgcttaccgttttcatttattaatcttacggttgcggtaatcttatcaccatgtttttcggcatctataatttgtggtgaactaatcatcattaaacttcctttagatacacgcttctttacatcatcataaaaagatgatcctttttttatatatgacgatacaaaatcaaaatccgactgattaaacgcagcattattcgctaaagaatatccagcaaagaattctatcaatttgttcttcaagctgttttcttctttttctttcttttcaacatagtcttcgatatcttcactgtcaaaattcaaagttatttctgtattgtattttaaatcgctggctttaatcgtcttcgtctgtgttgtaaatgttttacctttcgctttacctgaagccgaaatggtaatatctttattttgtggatatggaccatacgttttggaacttgaaaatgccatttcacggtcatttatagttacttttttagaactatcatttaattttgtatcgccttttaaagttacagatatatttgcttcttcaaaatcttcagtaacatctaccgtttcagaattactttgtctaaaatcaaattttaaatggcctgtaaaatcaccgttctcagttgatttcatagctggaattctatatgtccccggtataaaattacctattggcgtcactttatttgcttcagctataaccatctttttcttaccaccagatttaaactcatattttgttttttctttcggtttaacaattggttgcttggtaggtgcagtaaagctcatattatcgaaaaagatataacgtgtgccatttttacttacacgtaatatattttgaccagatctggtttgaatataagaagctacgctggtcttactcttattcaatttatgtaccgtatttttaaggtcgctgacaaattgcttaagcccaacttcatctttgatatagttaatgtatactttcgcttcttcagaatctactttattatctttagtacttaataatgttgctactttttgtttatcattattctcaatcgcattcactaatattttagtttgcgcttcaggtgaattgaagtttcttagtaaaaagaacaatataataattaagattaaaatgaaaaaaccaattgcccaaggcaccatttttctcatcttgatgttattagtttgtatatcttcatcggttgactttctatataatgcttgacgactatcaaatttatgtccacattgtgtacatatctgtacatcatcttgtgcttgttgtccgcacttcgggcaagatttcatactttcacctcaattctgttcctcttcaattgttatatgtatatcataaaaattattttattattttaccattattattttacaaatattatcccaagaatacaattcaagaaatgattaactttactttagaattgtaccttattacattatttatgaaagtactctctcaattataactaaaaagaaggtgttcaatacatacataattagtcttatatttgaacaccttcaaaaacctatttatgattgctatatgttttaatgcgatgattgattacttctaatacttgccttacattttcaatatcttcagaatttaaatcattagtaatatcttgcgcaatatctgtcataatcgcattacgttctttcaaatatgctctacctttgtcagttaaggttatgaatttcaaacgttgatcaatatttaaatttggtttatctaacttaactaatttagcatcgattaactttttaattcgtcggcttactgcggccttatttacaccttgtctttgcgtgatttcactaattgtcaaaggttctttatttaacatacctaatacgttagactgctctaatgaaatttcatattcattttgtaaatctttcaacatttttgcagttaatgcgttaacgttatttataaactgctctaaaaattgaatatggtcttgtaaatgttttaccataattatttctccctaattactatttttataaagtatcctcagcaatcattgtatcgcacatctaaaaaacacaaaaatattgacccatatataatataacaaattaagacttacatgttgctacgttctccttgctttaataaattaaatcatctacatttatatttaatatttattataagcgaggtgtcagtatgttattgaatttattattaatatttatacttatcgttatttgtccgttaattttcaactatactctgacgttaaatttaacatgctacatcttagttgtcatatcgatatttttgtcactcatctatagcatcatgacctatactttcccttggtctatgtttgtaacatttataataatcagtattatcatgctattcaaacatagatatttattttctcatacttctagtcgcttatttattaaaaaattattatctttttcatataaatttgtactctacacatcagcacttctatttataagtacgattcagtcacctattgtgaaaggtttgtctatgtggttcgctatattatgtctttccctgttactaacctttatttgttatctcgtttggacagtatcatatagacatagatcatacaacaaagaagttgatatcataattgtgttaggtgctggtatttttaccgaatttgtcacaccaatgcttgcagcgcgtttagaccgtgcacttgatatctatcaacaacaagcatcagcaacaaagatcattgtatctggcggacaaggaccagacgaaccaattcctgaagctttagctatgcaacgctatttgattgcacatggtgttgataaaacagatatactaatggaatctcactctataaatacatacacaaactttttatattctaaacaaatcatcaacaatttgtatcatgaagcagttaaaattgtttgtgtaacaagtcagtttcatgtattacgcgccttacgactagcccaaaaattaggtttatctatcgatggtgtcggaagtcatacaccatatcactttttcttacatgtgctcattaaagattatctaggcgtaatgtatcagtatagattgttattaacgttatattgttcaagtagttggtttatatgtctttacgccgcttttatttataatagttaatccacaaacaaactattattataggttgtttctaatattgcgtcaaactatctttaaatattcgttaatccttgattagacaattgttatattgaaaataaataaactaaagcacgtcatcattttatataatagtgacgtgcttttttgtagacccaaatcatattctgttatctaacttttatactactatgtcttaaatcattaacatttagcgtctttgcaagccactaatcagttattttgccatcttctaattcaatcactcgatctgcatattcaaataatcttcgatcgtgtgtaatcataataccaatcatttgttgttctttaatttgttgacgtatcatctcaacaacttttgttgctctatcggcatctaaacttgctgtgggttcatctgctaaaatgattttcggattattcataaatgctctcataatcgcaacacgttgcttttcacccccagataactgatgcggatatacattcaagcgatcttctaaaccaatatttttcaaaagttgtattgctctttttgaactttgttgtttggtcattcccgcttcttggcctacgagcgtcaattgctctatcacttttaaataaggaactaaatgtgaagattgaaaaataaaaccaatatcttccaatcgtaaatcactaggacgatgctgtttatcaaacaatggtgtatcattgtaaagcactgtaccactcgtttgacttaacaatccgcctaatatcgttagcaatgttgttttcccagaaccagaggcaccatttaaaatgacaaattccccttgttccacttcaaaattaataccttttaaaacttttgtttcagacaaaccttctccgaaatttttgacgatatcttcaacgactaatgccattattctgcacctccaattgcttcgataggatccactttaaataatttgacaaatgatagtgaggcacctaaaatcgctactaatataaatatccccaccatcaataaaatattttgcgttgttaagtaaaaaggcatggtaaccggcatcataaatgatagtcctactatgataatcacagcaatacctaccccaattattgttagtgttaaaatttgtaaaactaacgcactcaataaatgtcttgtcttaataccaattgctttcaaaatgccaatttgtgatattttttgaatcgtcataacatagaaaaatgcacttagaacaattgctgtaatagcaaacaaactaacaatcatcatatttaacggtgcttgctctgcttgataactcgcaatattacctgttaaatctttttcactcacaacttgaacgtcatttattttattaagctcatcacgttgttgttgcgttaaatttttcactggataaaatgccgtattaaccttattcaatgcattaaatccgttatcgttcaatagcacaatggaactatgcgcatacattgtgtcgtttaaaataccagaaactctataactagttgaattatttttaaaatgtaatctatccccgactctaatgttgtctgcagctaacttatcattaatagccacctcatgagcatttttaggataatcaccttttttaagttgtaagcgttgttgtttaacgtcattcattgtaatcacatcttgttctttattagataattttaatgtttgaacattcattttatgtggttcttgatgaattacctttttaatttgattctgttgcgtatcactaagttgcgatttctcaatttgcggctctttcattttttgaacaacatattcatcattatcaaagtgttcaaataacgaaatattctccctaccaagcccttgagctaaaccactaataaataacaccataatacttaataaaagaatgattaatgtgattaaaatataacgaaatttgtaaaacataatctcttttatcgctaatttcatatcgattcacttctccctatttcttctttagcgtcagtataaggttgaaatatgaactcaatatgaacaattgtttttttacgcaaaaatattttacatgtataataaatgaaaaagataagggagtttatagctatggtgcaatgtcttgttgtcgatgacgatcctcgaatcctaaattatatagctagccatttacaaacagagcacattgatgcatacacacaaccaagtggtgaagctgcattaaaacttttagaaaaacagcgtgtcgatattgcagtggtagatattatgatggatggtatggacggctttcaattatgtaatacattaaaaaatgattatgatataccagttattatgttaacagcgcgggatgcacttagtgacaaagagcgtgcgtttataagcggtactgacgattatgtaaccaaaccctttgaggttaaggaacttatttttagaattcgtgcggtattacgtcgatataatatcaattcaaattcagaaatgaccattggcaacttaacgctaaaccaatcctatttggaactccaagtatctaataaaacgatgacgttaccgaacaaggaatttcaattattatttatgcttgcaacacgtcctaagcaaatctttactcgtgaacagataatagaaaaaatttggggctatgattatgaaggggatgaacgaacagttgacgttcatattaagcgactacgccaaagattaaaaaaattaaatgccacacttacaattgaaacagtaagaggacaaggctataaggtggagaatcatgtttaaaacactctatgctagaattgcgatttattccattacggttattttatttagtgcattaataagttttgtattaacaaatgtttactatcattataatttaaaagcatctaatgacgcgaaaatcatgaagacgcttaaagaagcaagacaatatgaacaatcggctaaaccaacgcacattcaacaatatttcaaacatttagggcaaatgaattaccaaataatgaccgttgatcaaaaagggcataagacattttatggggagccttttagagaagatactttatcacaaaatgctattaacaacgtgttaaataataaagattaccatggtattaaagataaaccattcgcattattcgtaactggatttttcgacaatgtaacagataatactgttggtattaactttaagacaaaagacggttcaatagcagtattcatgcgtccagatattggagaaacatttagcgagtttagaacattcttagccgtcttgttaatgttgttattatttatctcgatttcattagttatcgcatcaacctattcaatcattcgtccagtaaaaaagttaaagctagcgaccgaacgcttaattgatggtgattttgaaacacctatcaaacaaacacgcaaagatgaaattggaacattacagtatcactttaataagatgagagagtcattgggacaagttgatcaaatgaggcagcattttgtacaaaatgtatctcatgaaatcaaaacaccattaacacatattcatcatttattaagcgagttacaacaaacttctgataaaacattacgacaacaatatataaatgatatttataccattacaacgcagctgagcggattaacaactgaattgttgctcttatccgaattagataatcaccaacatttattattcgatgataagattcaagtcgatcaactcattaaagatatcattcgacatgaacaatttgctgctgatgaaaagtcgttaatcattttagctgacctagaatcaatcaatttcctaggaaatcaacgtttgttacatcaagcattgagtaatttattaataaatgctattaaatatacagatgttggtggtgccattgacatcgctttgcaacatagtcacaacaacatcattttcacaataagtaatgatggttcaccaattagtccacaagctgaagcacgtttatttgaacgtttttataaagtgagcaaacatgataatagcaatggtttaggtcttgcaattacaaaatccatcattgaattgcatcatggtacaatccaattcacacaaagtaacgagtatgtaaccacctttactattacactgccaaataattcacattaatctctacctcctgaaaaacatttctgtttttatttcaggaggtatcttttatattgattagcgctttctagccacttaacatttaatttctaccattcaacacattttaaatatatcgatggtcgtttatggtttaataattttgaaggaggcattaacctatgatgaaactcaatttatttatcaatgcaaatgagacggaatcttatattgatatacatgcacctaaaatgaatgatcacgttcaaagtattattaatgcagtcaatgatttagacaaatcacatacattagtcggatacatagacaaagaaatccatatcattcatatatcagatgttataacattccaagttattaataaaaatgtaacagccattacaagaaatcaaaaattcaaactaaaattacgactttatgaactagaaaaacaattaccacaacatttcattcgcatttccaaatcagaaatcgtcaacaagtattgcattgaaaaattattattagagccaaatggacttatacgtatgtatcttaaagacgcacactacacctattcttctagacgttatttaaaatctataaaggagcgcttatcaatatgaaaaatttgaaaaactcattattcattagcttaatcattggtttgaccctttcactgttctttagtatgttatttgcagacggcaaatattatccactgaacccacaatcaactattggcatattgtattatacgcatttcacagaaactaccgtaatgttgatttctatcattttatggttactcataggcgtcgtctttttccttggagattttatctttaaatacacagattggggcattactaaagcaactatagtgcatttcataacaacgtatgtcggattcttacctttagcaatacttgccggttggtttccactaacaataaattacctaatcatatttacaattatctttattgtggtttacacattgatttggattattcaattctttagaaacaagaactacgtagacactattaacgagcaactgaaacaattaaaatgatttttattaaaattataaaagctatacattgcattaaagtagtctcttctgcaatgtatagctttatgtcgtatttattttaaatatgcatgaactgaataatatctttttactattttcaaattgaattgtaactgcaactgtcctttacgacatcaacttatcatgataaaaacctaacgaaatgcattttcaaatattttattcataatttctgctacttctttaggactttctttatatcctcgtttgacccaatcttgcaacacaccaatgattgcattactcataaaaataagtaaaaaatacttttccttcgtcgttaacatttttgtatttaatactggtacaacattaatttcgatacgttgttgtagtgatttttttatgacttgatgtaatttataagcactctcatcacctaataacattaaaatgagttgaccttcgcttagccaaaaataaatcatcttttttaaaaatattgcttgtgtcagagtttcacttttaagaaatttcttttttgcttcttttaacaatgtattaagatagctgtatataaaatcatctttagttttgtaatgtgtataaaaggttgtccgacttatttgacccttttcacatatatctttaacagttatatcattatatgccttcgtttttaatagatttaccattccatcatgtatgcgatttatcgttttcgtaacacgactatccgtaaaagctgtttgatccatatgccccaccttttttctgaacactaaaagaaaatatgttcactatctattaatattttattcgcaatcttaatatacgcttaagatgatatataaataaagtgaaatgtatctcaatttaggaggggttgtcatggacgcaactatcgcgaagttggataaagttgaaaaaacgtataataagcatcacgtattaaacgaaattagtatgtcaatcaataaaggtgaacttctagggttaataggtcctagtggttctggtaaaacaacaacaataaagtgtttactaggtatggaaaagatagattctggatctgcagaaattttcgcacataagatgcctaatcgcaaagctttaaatcgattaggctatatggggcaaactgatgcattatacgaaaacttaactgcttatgaaaacctagagttttacggtcgtttgtcaggactgaaaggaaatgtattaaaagataatattgaaaaacatatcgttctagtgaatttagagcaagcgttaaataaaaaagttgcacagttttcaggaggcatgaaacgccgattatctttagcaataacattgttggccgaaccggaattaatcatattagatgaaccaactgtaggcattgaccctaaattgcgccaacaaatatggcaacaattcaagcaaatgaccaaaaacggaaagagtgtcgtcatcacaacacatgttatggatgaggcggaacgttgcgataaagttggacttattgtcgacggaagaatatttgctatagatacgccaaccaatttaaaacaaagatttaatgtagatacaattgaagcggtatttattaaagctgaggaggttcgtcaatcatgaaaattttagctattgttagacgaatattaaaagaaatgttacgtgataaacgtacacttgcgctaatgtttctagcaccaattttaatattgacacttatgtattttatttttaacggtgatgaaaacgatttaaaaatcggtatcgatacatctgtttcatcaaatataacaaaacaattgccatcatccgacataaaaactcaaacgttccattctcatgaaaatatcaaatctaaaatcgagaataatcatcttgatggttatatttaccaagaaaatcaaacattgcatgtcatttatacaaatgaagaccctaacaaatctaatatgatcaaacaaatgattggcaaagctatacaacaagataaaataagcagtataaagcatctaattgaaaaagcacctccgacaatgaaagcaccaaacaaacaagatattaagatttcacattcctatttatacggtaattctgatagtacttatttcgataaaatgtttccaatactaatgggcttctttgtatttttatttgtatttctaatatcaggtatagctttattacgtgaacgtacaacaggtacgttagaacgtgtattatcaacttcaattcgtcgaagtgaaatcgtccttggttatctgattggctatggtatattcgcaatcattcaaacattaatcatagtcctattttcaatatatttattgaacattaatttagcaggtagcttatggtatgtaattttgattaatatttgtttagctattacagcattatctatgggaattttcatttcaacgtttgctaattctgagtttcaaatgattcaatttattccactagttgctgtacctcaggtattcttttcaggaattttcccacttgaaaatatgcctgattggctaggtaacattggctatatcttccccctcagatatgctggtgatgctttaaccaatgttatgattaaggggcaaggttggagtaatatatggttcgatttactaattctaatgatttttatcatggcctttattatcttaaatattgttggtttaaaacgatacagacaggtataaattctccaaaacttttaaatgacttcaatcaagataagcttctaaatataaagcactgataataaaaacaaccactaaaaaaacggtaatgtctatcacattaaaaaagacattaccgattcgtttattatttaacttgtaaatacttagttacttcttcattaattttgtgatataaatcctcatgatctgttaagcgataaccaaatgacggcaccatttctttaatctttggttcccaccctttgaattcatcacgatagcatcgctgtaaaacatcaaacataatatctacagctgttgacgcaccaggtgatgcaccaagtaatgcagctaatgtgccatcatctgacgtaatgacttcggtaccaaattgtaagttacctttagaatcctcagtatccttgattacttggacacgttgccctgctgtaatcacttcccaatcttcatttttagcatttgggaaaaagactcttaaatcatccatacgctcatcattagataacatcaattgtgacactaaatacttcgtaagactcatttctttgatacctgcagataacatcgtcacgatattatttggtttaaccgatttaattaaatccatatgtgaacctgtttttaaaaatttaggtgagaaacctgcaaatggaccaaataacaatgaacgcttgccgtctacaaaacgtgtatctaagtgcggcactgacattggtggcgcacccactgctgcttttccgtacactttagcatgatgacgatcaatcacttcttgatttgtacagcgcaggaataatccacttaccgggaaaccaccaatatgttttgattgtttaattccagtcttttggagtaatggcaaactcgcaccaccagcaccaataaatacaaaatcagattcgtatgttgtcgtttcgttagtttctaaatctttaactttaactagccatgccccagatttctgtttcttgatgtctaatacattctgcttatattgaattcccacaccacgttgttctaaattattaaataactttgcagttaacgcaccaaaattaacatctgtaccagtttcatcataagttaaagcaattggttcatcagacttacgaccttcaatcattaacggtacccaagatttcatttcttcttcatcttgcgataatttcattttttcgaataaaacacttttctttaacgttgcaacacgactttttataaaagctacattatcttcgccaatgacgaaactcatgtgtggcaccgcttgaataaagcgatctgggttatctaattgtcctgttttaactaaatatgcccaaaactgttttgaaatttggtactgctcatttatcttaattgctttactacaatcaactgtgccatccttaccttcttttgtatagttcaactcgcaaagtgctgaatgccctgtaccggcattattccatacatttgaactctcttcgccaggttgtgctaatttttcaaacactttaatatttttctcaggtgataattctttaagtaaagttcctaatgttgcactcataataccgccaccaattaagatgacatctgttttgctatgttgtgttgtcataacaaatacagtccccctttttaaaatgaataatggaacgttcgagaaatacgacatattaataccactttgaatcaataagtgtctcaacaggttcccatggtgatgctctattactatctactatgtatataaatattttataataacgaaactactttaattatatactttatgtgcgatagcacaaagacaaaaccacaaaccttaacagctatcaaccaatttaatttgattgctgattactcactcttcattttaacataaagcgctaccattattataatgtcaaacttctttcattaatgatccattaaaaaaagatgagatgttagaaaacatctcaccctctgtatatttatattttgaaatacgtttatttatagtaatgacaagatgaaagtccaaatacagatgaatattagtaaacatacactgtatttcaatgtcatttttaataattctgattccttaccaacttgttttactgctgcagttgcaattgcaattgattgtggtgaaatcagttttgccgctacaccaccaactgtattagcagatacaagaagtgaaccacttgttccaatttgttgtgcaacagaagcttgaattggtgcaaataatgagttgttatttacaactgatcctgtcataaacacacctatccaacctaagattggtgatagaactgggaagacattacctgctttagcaataccttgacccattgctgcacttaaaccaccataagttgtgattttagaaattgctaagatgaaacaaattgtaagaactggtaaccataattctttaaatgtaacaccgaataatctacctgcatctttaaagttaacctttttagacattaaaattgtaataataatagttaataaaatagctgtacctgtttgtccaataatatttaaagtcaatactaatggtttatgcgtaacttcgctgactgttccaggtaagttgaatttaaatactaatgatgataaagcaccatttggtaagaataagtttttaaagaatggcgcactccaaatcattacaatgactgttaatacaatgaacggactccatgcatgtaatactgcttttgcagaatgtgcttttgcaggttcaatttcttcatctttattaacacgataaatgtgttttggttggaattttttagaaaatactgctaatgctaacattgttaataacggtggaataatatctgctaattcaggtccactgaatacagttaataatccttgagtaagtgtataagtgattgaaactactaaaattgctggtaatgtttctttaacacctctaaaaccatcaataataaagataagtaagaatggaataatgaaatttatgattgccaatgttaaagttgctgattgagaaacacctaatactgaaacatctccaggtaatttcaacgtttctacaacacctacagggataccaatcgcaccaaaagcaccagacgctgcatttgcgactaaacataacatcgcagcttttaatggattaaatcctaattgtgttaataaaagtgcacaaattgcaattggtacaccaaatcctgctgcaccttctaaaaatgcgttgaatgcaaatccaataagtaaaacttgaatacgttggtcttgtgaaatatttgtaatactatcttgaattgttaaaaattgtccagattcaacagtaattttgtataacaatactgccatcataacgatatagccaatcggaatgataccttggaagaaaccttcgactactgcaccagaagcgataccaactggcaatttgaaaaatggtattgcaattagtaatgttacaacaagtgttgtaatggctgcataaatacctttcattttaaaaacagttaaacaaagtaaaaacagtacaatcggtattgctgcaattaaagacgataataataaattatcaaatgggttaaacgtatttactaacataggctgactcttctttccataaagtagtagtgtaattgcttcattaaaatcatgctctggctatagcattttgttatcgataacattttacagaacagtgagattaatgtgatttttttcacaattaaaatataccattttttcagactattaacaatatcactttcctatttaattgttttatttttcattttaaatctgttcatcaaaatgaattgtacttaatgtaatgaagtaacttatactattcatgaattttacataagaccgtgctaaaataaggaagatactacgatgagaaatggaagttatagcaatgattaaacagataaatgtttctaatatgcaaaagtttgaatctcaattaatgaaagctcagtctgaaggttatacacatgtcgttccatacgccaatgagataatgatttatcaatctatgttagatgcggttcaattatatcctaagtctatcgtggttgattatactgttgatggacaatacaaaaatgattgtcactatttcggtcaatcatcgatcaacattgccgattgggctcaaaacaataattattatcctaacctgatatatgcgattcaacagactcttgatttaatacattattactctgtagaaacgattttcgatttagctttattgacacttctgaaaggtgatttatcaatcgatggtcatgtcgtttttgattttaaagcccctttagcaacaagtgcttcaatatgggaaactattaaaactattgaagattttgatatgatgtctcagttttatttgaataaaatggcttatattgatcatcatcctataccttttcgcaacctttttatcgaggattcagaacaacttaattcgccagataattggttgtattctaccaagtttatgctacctaaatggttatataaaatagcaaagcaacgtgctgataacaaacaattacaaaacttcggcttgtatacgaagcaaccaaacgttttaaaagatcacatcgtttttatcggtgatcatcatcaatatataggtaattcaaaatatttatttacttacttcgttaaacataatccaatgactgcctgttattttgttactgacgatcgtcgcggaccacatttcatatcacctaggtctgaaaaagctgacgaattaattaacagcgcacgcgtagttttagttgaaaatgatatacctgaaacgttacaaccaaacggtactttaattcaattacatcaaggcacaccaataatgcaattatttttagatagtaaagaacctattaaaaatatagaaacacctttttatcgtgctaaaaggtataatcgctggttgcaattcgattatgttatacattctgctgatgatattagccacttttatcaaacggcttttcctagtcaccaagcaaatgtattggcttatggtaatcctaaacaccaatatttactacaaaagcgtaacgaaagtaatactcaacaacagtataagaaatcgtttaaaataaatgatcaaaaaccagttttattatacgcacctattggattagtgagtgcgcaacaattaccactatcagatgctttattcaaagcctatcatgttgtggttcagggtgttgatgaaacgatgttaccagaagaggcgcttgttgcaccaaagtatcttagtgctcaagacttaattctaatgtctgatgtcgttatcactgattactcaaatataatatttgatgcgatggctatagacaaaacagtagcattatacactccaaatcacagtcaatatattgagtctcaaggtgttaacgaagatatttggcgtcatctatcaaaaatttggtatacagaccgacaattattaattaataatttaatttcccaggcaataccagtgattaaatatccacaaatacaacataaagaacaaccattagaatctatttcacaacttatattgtctaagatgacatctaatcaatagtgtttaaattcctcagtggctgtgaatgaggtttaaaagtactatagaacgtaaacctttatactttaaaatacgcaaaaacggtaaaccctaattcatattatagagtttaccgttttaattttttaacttgcatcatagttatattaacattattgttggtagtttggatcagtaaccattgcttgtccagtataatcaaccgttacaattgaatattttccatttgcatttgggtctttaaaactaaacacatacttatagttgccattatgttcttcaatagaataatcattatacactttattattactaccaaatttatttgcttcattattagcagcatttaaagctgtttggaaatttggcaattgctgtaaagcttgagttttatttccattaaacggataaatttgacgtgcaaccggcgcggcattttgtccataatatggtgcaacgtaacttgatttttgattattattcgcttgattattacttgattggttattatttgtttggttttggtcattgtttgttgcatttgaattagattgttgctggttatcgtttgcactattatctttattatctttgtttacgtctttactatcatctttattatctttcttatctttagatgaatcatttgtttttttatcttgttgttcagttttcgctttatcatctttttctttattactgtctttttgttggtcactatcttgaccacatgcagctaaaaataatgataatgctagtaaccctgtaactaatcttttcatacatatctcctcctataattcgatattcattgaataagcttgaaatacatatctaccatgtgtatcatttcatggcttgttaccaaagacgtcaacattaatatgatttgaattatcacaatacccataactacaatctaaggttctttttattataccctaatttttgttcattattatttaatttttgtgaattttatgttttctataaatttaattattttactttaacacttcattacgcatttagcatttcaaggtatacagaatatttattactatgatttcattttatctgctgcaaaaacaatcattataactctttttccataattaaatctgtatccgttacatcacctgtttgaaaatgatgttcaccaaccactttaaatccatgacgtttataaaatgcttgagcacgaggattatgctcccaaactcctagccaaattttatgtttattatgttcttgtgcaattttttcggccaattctatcaattgtgaacctcttccgccaccttgaaagtctttcaaaaagtatatgcgctgcacttctaaataggtctcccccatttcttcagtttgagcactattaatattcatctttatataaccaacattcgcaccatcttcttgataaaaataatgaaatgaatctacatggttaatctcttgtgtaaatttttctacagtataattgtctttaaaaaattgatcaaaatctttgtcatcatagtaagaaccaaacgtgtcataaaatgttctagttgctaattcaactaattcactagcatcttgttttgaaatctctttgattatcccagccatataaatcctccaataaacagtgatcgaatcaaaatattacttaatttttcagccaaaactatttaaaaatacattaacacaaatcaattacaaattgtattgattgtgtgtaacatcaataaatgatacatttattccagtaaaatggccgtattttcaaaagagaaaaagagaggatgtatcgttgtgatagaaacatttaaagcgtttgtaattgataaagatgagagcggtaaagtgacaccaactttcaaacaattatcgcctactgatttacctaaaggagatgtgctgattaaagtacattactctggtataaattataaagatgctttagcgactcaagatcataatgcagtcgtaaaatcgtatcctatgattccaggaatagatttagctggtacaattgttgaatccgaagcaccaggctttgaaaaaggagaacaagtaattgtaacgagttatgacctaggtgttagccattatggcggttttagtgaatatgcgcgtgtaaaatcagaatggattatcaagcttcctgatactttaacattagaagaatcaatgatatatggcacagctggttatactgccggtttagcaattgaaagacttgaaaaagttggaatgaatattgaagatggtcctgtactcgttcgcggtgcttcaggtggtgtcggtactttagcagtactcatgcttaatgaacttggttataaagttatcgcaagtacaggtaaacaagatgttagcgatcaattacttgaacttggtgccaaagaagttatcgatcgacttcctgttgaagatgatcataaaaagccactcgcatcatcaacttggcaagcttgtgtagaccctgttggtggcgaaggtattaattatgttacaaaacgtttaaatcatagtggatcaattgcagttattggtatgactgccggtaatacttatactaattctgtattccctcacattttaagaggtgtaaacattttaggaattgactcagtatttactgctatgaaattaagacagcgcgtttggcgtcgtctcgcaaaagatttaaagcctgaaaatttacatgagatcaagcaagttattacatttgatgaacttccagaacaacttaacaaagtaattaaacatgaaaataaaggccgcattgttatcgatttcggtgtagataaatagtattcatgaaaaagacatcccgttatgcgagatgtcttttttaatttagtatttaatatacattccacctgaatctggttccgtaggcataaatccaaattttgcatacaatttatccgccgggtagtctgcgatcagactaacgtatgcactttcgacagatacatttttaatatacttcataatatgttccataatttgactgccgtaaccttgaccttggtaacttttcaaaactgcaatatcaacaatttgaaaaacagttcctccatcgccaatcactctacccataccaattaaccgatctttatcatacaaggttactgtaaataaggcattaggtaatcctttttcagctgcttcgcgcgtctttggactcatacctgcattaatccttaatgcacaataatcctcgcaagtcggaatatcatatgtcactttaaccattatttaccccacttttcatcacacaatatatcaacctagtataaatgtttatttacaatagtcttattcgcttctttaaacacttcatgatgacttgaaacataaccctctgcattcgcatctggttggatatatgttttagcaaggttcgctgcatttgcaccatcactaaatgcacttgcaattagatgtgattttgcatcatgataaacaatatctccacacgcatagataccaggtatacttgttgtcgtatttccaaatcctttaacacgacaatcatcatgcatatctagctttgaagatgtttcacttaataatgtattacaacgatcaaaaccatgactaataatgacatcgtcaaatttaactgtatgcgtatcaccactttcaacatgttccaaaacaacttcacttatatgcgtttcatcatcattgccgaccaagtatttaatacgtgttttcgggcatagtttcacatttaaatctgtcaccagcgttttcatcgcttcatgaccacttacatcttcttttcgataaacaactgtcacgcttttagcaatcttggcaatatcatgcgcccaatctaatgctgtatttcctccacctgatattaatacatctttatctttgaaacgtctgtaactttgtacaacataatgtaaattagttaattgatatctctctacacctttaacatctaattgttttggattaataatacccgcaccaatagcaatgataactgctttcgatgtatatatttctcccgcttctgtttcaacttcgaaatgacgttctgcctttttcctaatatctaccacacgttcattcaaatgaacttccggtttaaaatataatccttgcttaattgtatcttttaaaatttcatgacaaggttttggcgcaatgccgccaatatcccaaataattttttcagggtaaattctcatcttaccccctaattcagattgaacatctattaatcttacagacatatctcgcaatccagcataaaagcttgcatacaaaccagacggaccgccaccaatgattgtaacgtctttcattatgtgcctcctatgactctctatattcatttctttcattaacgcgctcaaattgataattattatcatttaaagacattatactattaatatttatattgttaaaataaatcgcatagttagccatgaattatcaataactatcccatcacaatataaaaacacacctttcaaagtacgaaacaacaatgttcctttgaaagatgtgtatattttttagttctagttatattattttttaaaagactcatcacgtggttctttaagaattgcttgtcttaaaaggaaaaatagcaacaataaacctgcaagcatacctgtgtgcccaatacctgcaaagcctgcaaatgcttctggagagtatgatttaccagtgacttggaagaatccttttgtcaccatcatacctatagtaacgataacacctatgttatatacatagaagaaccagttaaataagtagtaacttgataatttaaataacttctccaatggtaataatattaaaaacataaacatacctaaaataagtgtatgtgtgtgtacaagtgataattgtgttgtaccagtaaaatcatatgcttttgttagctctctatagaaaaagccactaaataaacctatgatcatataaaaaagaaatgaatataataacctacgcattttgaatcctccctcaccttttcattatatccgattatacctattataacagtgacaaaaaagcgaagatatgacacaactgaatttggtttagcacatagtatgacagctaaaataactttacatcaagtgctatacaaataaaatagctataccatgacgctcgctacaaacgtcttgtatagctatattcctatttattaaattatgacggcacttcagtacgttttgtgctatgttttctaacaatagctgaaactaaacttgatacagcgccaaaaatcataaaccctataaacatccacattgtactatttaattcaatatgatgattcaagtataatagttctcttacacttgttgcatagtgtgtgaatggattccaatcatatacatatttttgataactttcaggcaacatttgtttaggtaacgttacaagttgcatactaaagaacattaaaatgaagaaaattggaattgacttcatacctagccataccataacacctaaaataaggcccacgaaaccaagaatcgcaagtgctacaaaaatcgcgatacgatttggatggtcaaaatcaaatccttgaacgccttgcatgaaataaatataaacgaagctacctgcaaatgctgcaacaactgcaaatatcatttgtccaattgaagcaatgatacgatgttgcacgacgatattgttactagttctaaatgcaaagaacaataagatagacgttacgattgaacctatccaaattggcataaacattaggaatggtgcattaccacctgcttggtgatctttaactttattaagtttttcattatccacttttactggattcgtcaaaccattgatgtccgcggcattgactttaacattttgactcgttaatgtttccaaactttgcttcgtaatttgagcattaatattatcacccataccagttaacacagctgatgcaatttgtgaaccttgtaagcttgatccttcacttacaatcgttttaaatttagcctgcttaacctctacttgttgattccccattttttgtttcatttgttgaactacttgtggcggaatttcacctgaagcaactttttgttgcatttcttcttttttgctatccataactactttttgtgttttactcatagcatcttttgaaaagtctttatcaataatagctactccaaagattttttgatctttcaaatctttttcaagatctttttcactatcaaccttaacccatttaattttattagaatcactatctaataatttatcctctaattttttaccaatgttaacatttttatcttgaatcgttgtacctttatcctcatttaatataccaattggtaaatcttttggtttaggattatatgcaggataaaaagctaaagaaaaaattaccaagataatcatagttgctattggtgcaatccataataatttatttttaaatatattcattttattaattacctccttattagacaatgtgttgaatattttgcatgttgtctattataatatgtaagtgggaataaacaatacacaatgttcatcaatacgtttattaatagacatatacacccacattgttcaataacacaaggaggttgatttatttttgaaagaagataggcgaattagaaagacaaagtcctccattaaacaagcgttcactaaattactacaagaaaaagatttagaaaagattaccattcgcgacataacaacacgcgctgatatcaatagagggacattttacttacattacgaggataaatatatgttactcgcagatatggaagatgagtatatttcagaactaacgacatatactcaatttgatttgttacgcggttcttcaattgaagacattgctaatacttttgtaaataatatactcaaaaatattttccagcatattcatgataatttagagttttatcatactattttacaattggaacgcacgagtcaattagaattgaaaatcaacgaacatattaaaaataatatgcaacgttatattagtatcaatcattctatcggaggcattccagagatgtatttttacagttacgtttccggagcaacaatttcaattattaaatactgggtaatggacaaacagcccatttcagttgatgaattagctaaacatgtgcataatattgtttttaatggtccattaagaataatggcagaaaaccgtttgcataaatcaaaccttgattcactaacttaagtaatactcgcttttcctaaatcctttagaaaggaactatatatcatgattacttcattcagacattctgaagatatagataaacatattataaaaacaccattagatcatacagcgtcatggattaatgtagtagaaccagaccgagaagaaattgaaaatcttatggaacaatataatatacctgaagactttatacgtgaccctttggactcagaagaaagttcccgtattgaatatgacgaagatactggttactcattaatcattattgatttacctatcgtcaattcaactaatcgtagcgttctatcttttgtaacgattccattaggcattattattggcaacggcattatcgtaacagtttgtgacgctgaaaatgaatttttagaaaatttacctaagcgtgatattaatttaaaatttcacagcagatttgcattagaaattttaactactattgccgaccattataatcgtaacttacgattacttaataaaagtagaattcgtattgagaaagaactaaaaaataacattactaacaaacaacttttcaaattaatggaagttgaaaaaagtttagtatactttttagctgccttaaaaggtaacgatacaattattaaaaagttattccgtttacctgcaattaaacgttttgaagaagatgaagaattactagaagatttaatcattgaaaataaccaagccatcgaaacaacagaattacatcaacgtatcttagaaagtatcacaacatcatacgcttccttattatctaatgatatgaatacgattatgaagacattaacacttttcacggtactattaacgttaccaacgctcgtatttagtttcttcggtatgaatgtgccgttgccaattgatgaccatagttatatatcttggattattgtggtaggtatttcattaattcttgtcgtaattgttagtattttcttatggcgaaaacagaaattataactaaattaaaaggtatgacagcttaaagtttcatcctattgcatttgcaatgactgatactttgattactgtcatacctctttttttattctacaacttctttatttgcttttcttttcgataaaattaaagtaactgttatagcaacgatgaatgatattgtcatactaacaaagtagtgtaaccatcctgcatgtactggattgattgaaataaatcctggcaatccagcagttcctaatgcgattgctttaaccttgaagaaagcaatatatgctgaaccaatacctgatccaacgatagcaccaataaatggatatcttagttttaagttaacaccaaacatagccggttctgtaataccaagtaatgctgaaatacctgcggcagatgccacaccttttaacttcttattttgtttaataataaagaacgctgcaattgctgcaccaccttgtgcaacattagacattgtcgcaatcgggaatataaatgatccacccgttttagtggcatctgcaattaatgtcgtttctacagctataaagctatgatgcatacctgtaataacaatcggagcatacaataatccgaatattaatccaccaattgcaccaccaaattcataaagccatgttaaaccatctgataaccagtaacctaattgtcgagtgattggacctacaaatgaaaatgttaaaaatgctgttataaaaatagataacaatggtgttaacaaattatctaacaccgttggaataactttgcgtaaccctttttcaattgaggctaagatataagctgctacaagcataggtaacacttgtccttgataacctacttgattaatatgcaaaccaaatacatcccaatatggaatagccttacctgcttcaactgcttttgggaaatcgtatgcgctcattagcgatggatgaaccaatatcatacctaatgcagcacctaaaaacggattgccaccaaaacgttttgctgcactaaatccaattaaaattggtaataatgtaaatggtgcattcgcaaaaacatttatcatttcagctaatccagcaaattgactatatacatctatcaatgatttacctgaaaagaataaatctttcgcagtcaaaatgttatttaaccccattaataaaccaccagcaacgatggctggtataatcggaacaaagatatctgacagcatttttacaaatcgctgtaacggattcatatttttagcagattgtgctttgacttccgaagtggtcgatgcttcttttccagttaatttttccagttcactaaatactttattgactgtaccagacccaataataatttggtattgtcccccagtagaaaatgtccctttaactacatccatattgtttagcgcctcttcatttactaaactttcatcatttaaaactaatcgtagtctcgttgcacaatgcgccattgcatctaaattctcttctccgcctatcgcgttcaaaatatcttctgcggattgcttataattcatatatttagcctcctaattagaaccggttccatttattccactttattgtaaccggttccaaaaatatttgcaacactctattatcattttatataaacacttgcatcacttttgatagcgcattcatttttattgctatactacatgcatgtatattaacattaattatcggaggtaattttatgaaagaacgtggccatatcgaacagctttggcgtgaggaaaaatatcatgtattgttacacagtcaacagtcttaccaaatgataaggaatgctttaaaaacggatttatcacttcatcaagtccaacaaatgattgatgatgctttgttaattgaaccgagtataggaagtgtatgtaatgcttttgatcatatgtggggatattttaaaaaatgtgcgaatgaagaagaaagacaatactcaaaattacttaaagctgattttattaatggtaaaatcgacacccaaactttattagattttttagcagaacttgctaataaatatgatgttcaatatttactacaaagtcgtgttttaaacacaaaaagaaagagatagattgaaactttagttgtaacggacaaatagtagtcattggagttcagcaattcatactttgtactaaagtttactataatctatctctcaaggtttaaatgtacatatctatattaaaatgcgtttcttgatgttagaagataccatacacatttaattagttacagcataaatcaatttatacccttaattattacattgtttatattttaaattcgggggagtaattttaagtaatatcttgttgctgctaattctattgttaataaattgatattagatgtagaaattgagtgtgaaagttaataatagatgatttagctagtaacataattaattcatatatagtcaaaaagttctgttagatactgttcttgatgaatattctttgatgttaggtgttagctattctagatgagtttcttagatgtggatgcctgtcttgatgaagttatctatgatgttaatataatacttgatgttgattcttagatgttagtgcgatttcaagatgctgattctttgttgttgcactatcttggtgacgtttctagttgtttatagttatcgcatctcttgatgtaaaatctaagatgtttatgcatttctagatgttaattcttcgctgcttaagaattatcttgatggtaaatctagttgtgccatgcattttctcatgatgaatctaaggtgttaattcattgatgtgtgctgtttcttgttgtttcattatcttgatggtgaatttcgttgtctaatgcactttttcaaatgattattctaattgttacggcaataactagatggattttcttagatgttcacttttctagatgtttatacttatcttgatgttttctaaacagaacttttaaacgctttattttttagtagattgtttaaaatttcttagttgatggttattgttgttgatttgaataatttgtagcgaatattttgtaacagggctactaagaatttttataacaagaagtgatttcaatcgtactaattttcagcgtttgatgacaaaagtgtatgtccaaacttaaataatggcgataaaatttaagtcatgggtacatttaatgttttttgattcaaacttccattttggtcaatttgctttttttataacatagttgaatatcaataaaagattagcaagttagttcaaaatggctatgtattgttttttgaaatacataggtttgaaatctatattaattatgcaccaaataatttaattagactctatcgaaaatttccaaattttgcttactatctttctaattttacttttatattgtgcacaatgcataaaaacaagcgttttcctaggagttttcattaacttcttttatttttcactattaccttttcaaaaatattcaactataatgggtatactatccatgattttaaaaatttccatgttttacatttaaatgatagatttcaatatatattaggcaggagagagaaatatgacatgccaacttaaaatacatcatacattatcgacaataccaagtcgtaatattaataatattatggtgctattttcacttacaagtaaactcaatattacgattaatggtgaaaccaaagacgtaagtaattatattatcttaattaaccatggtgatatttataatattaaccacggcgaaaatataatcgaattaatgatacccgttttttatttttatcaacaagatgatgatttctttaatggttatttagatcgtcatttattacaatcaagtaattatattaagtcattaattgccgatttaatcagtacaccaacaagttcttctttaatggggaaaaatataggtcaaagtattatagacactttacttaaagaagcttttataagaatagatcatgaatatttaccaaatattgctttaagcaatccggtgtttatagactgtgtaaactatattcatgacaatattgatgcgcacttgtctttaaaagatatagcgatgcattgcaacatctctgaatcatattgttctaatctttttgttcgatatttgagtatgaattttaaagattattttacaagtattaaacttgttaacgccatcaatttattactttctacaaaacattctattacaactgtttctgaattggccggttttaacagtcatacaaattttgcaaatcaatttaagaattacttgcattttagtcctaaacagttccgttcactcgtttccaagattactgaaccaccacaaatacacttccaacaagataacgtatcacaattcactgagttaatttcaacaattgatttaacagctcaactggctacaaatacaacagatattcatatagatgattttaatccgaaagatcgaagtcagcgtgccaaagtatttgttcgatttagtaatttcaatgaactatttcaatttattttcaatgaatattacgatattaactttgagcacttaccaaaacctgtcgttttcattgacgatattcacgatattgagattagccaaacgaattacaacctgttaaatagatgttttgaaaaacttttcgaaaaaaatataggtttagcaatcgctattaaatcaacacaacaattcgaaacgatgaagcaattaatactaacatttttacaaggtaatcaagactataagacaagcaagaaattagttaaatttatgctcgtattttgctctaattctatgacagcagatgaaattcatttatgtcatcttaaaattaaaaacaaaaataaagaaattaaatatagtgtgacagtcgatggctttttagaaacttattcaacagtggaacaagtttatgatgtcatgcagcgtcttaaattccattattactttattgatattgaaaattcaaaaactgcaacacatcttatcactaaaaaccaacactatcatcaaactgacactcattttgaacagtataagaaattcattttagattcaggtatatcatcaacacaattcgtatataataacctgtctgtaagcggatttaaatatactaatgatggtaagaatccaattcaattatctgacatagtgtatcacttaatcgcattattacgatatggcggtggcattagctatcaattattagatgaccattcaaattatatttccttgtacaacaaatatggtagccccctaccattaatgcatttatataaaatgtttagaccttttgttaatgaagacattgaaattacaaataattatgtattgagtcgtaaagataataactaccatttcttattattcaataaaattaatgaccgatatatgtcagacgtaaaacaagacttcattttccataatgaattacctcaagattctttgatgattattaaaactttgaatcatgaacatggttcaattcaacatttgcttccaacaagcgatcaacttgtctatatagaaaaagaaattctagatgaattagacaaaacgaattaccctaaaacggagcttgcagttcaagaagaaactggtcgtacatttgaactcaagttaaatcacgacgaggttaaatatatttgctttaaaccaagctaaatactaacagtcctcttgtgtttagtttcttacgttaaaggctatttatatcataaggagatgatataggatgagtaactcacaagcaattcaagcaattgaaaacgtgttagcaacgtcaaaagttggtgtattatcaactgcatataataacaaacctaatagtagatatatggtcttttataatgatggtcttactttatatactaaaacgaatatccattctgctaaggtcaaagaaattaaagataatccagcagcatatgttttgttaggctataacgacacaactaatcgtagtttcgttgagatggaagcgacaatcgaaatcgttacagaacaagaagtgattgattggctatgggaaacacaagacaaaagctttttcagttcaaaagaagacccagagttatgtgttttaagagtagttccgcaatccattaagctaatgaatgataaatcattagatacacctattaaaattaatttataatatgtaagttttttagttttaaaaattagccagcaattgaacatgttagctataaatttcaacagtatcctatttatatatatttcgcttttgaaagcgtttaatacttttaactatatttttattatataacaatatttcagacacattttattcacatttattgtgattaaggtgtgtctttttaaattaattttatgtaatataaatactgcatttgcaaactgttgtactttaagatataacagaattaactacatttaaggagattgatgaaccgtgaaaaataaaaaaggttttggtcttggtattagtttaattgccatcatgttgattgtatgtattgtactagtaatcatgatgatgactggtggaaagaaagatacatattatggaattatgaaagacaatgctacaattgaaaaaatgattagtgaaaaagatgaaagcattgagaagaacgttaaattaccttcagatgcagacgtttcagttaaaaaaggtgattttgtaattgtttataaattagcagattctgataaaattgttaaagtaaaaaaagttgatcatgacgatgtaccacatggtttaatgatgaaaattcatgacatgggcaaaatgcacatgaaacactaattaagctttaattttgagtaatatataagatattaaaagcagcagtaagatgttttctaattgaaaattatcttactgctgctttttaagaattactgtgtcagtctatttccggttcgcctgcgctttgcgcatgcataaaagcccctaacaaccagaggtcccttcgtttcggttcgcctgcgctttgcgcatgcataaaagcccctaacaaccagaggttgtaaggggctttaaatgtcagatagtattttttaaattgattttaaatattcttgaccttttgctttgtcatatacgttttcccatttagctataacgattgttgataatgcgttaccaataacgtttacacatgtacgtaccatatctaagatacggtcaacaccaataattaatgctaaaccttgtgccggtaagcccatggcacctaatgttgttaataaaacaacgattgaagttcctggtactgccgccatacctttagacgtaatcattaatgttaacatcaacacaatttgctctgataatgttaagtgcattccatacatctgtgcaacgaataatgctgcaatagattgataaagtgctgatccgtctaagttaaacgtataaccaattggtataacaaaagaagtaatttcttttggagaaccgaagttttccattttcttcatcattacaggaagtacagcttccgaacttgatgtagaaaatgctaaaagtaattcacttttcaagattctaataatattcatgatattaataccacacatccatgcaactagtcctaatatagcgaatacaaagaacaccattgcaaagacaacaactaatactaattttaatagtggtaataatgcggatgcaccgaatgtaataattgtagtacaaatgaatgcaaacactccaagtggtgctaattttaaaattttattaatcatccagaacacagcttcaagcgatccgcttaaaaattctttaactggttctgcttttttacctactgcagctaatcctaatccaaagaatactgcgaagaagataataggtaataattcacccttatttaaagcttcaaaaaagtttgtcggaataatatgtacaatggtatcaataaaatgatttccatatgtagattgttctgctgcatgtgcagttgattgatatttagaaatatcacctttaggtaattttgttgggtctaatccagcacctggtttaaataggttaccgaagataatccctaaacctattgcgattgttgtaataatttcaaagtataaaattgttttccagccataacgccctacagttttcgattccccaacgttcgaaatagaaagcgctagtgagcaaaatacaactggtataacgatcattttaattaaatttaaaaatacgtcaccaaatggtttaatgtaatttgctacgttttcttgtccatataataaaagtcctacgacaacacctaacactaatgcaataacaacttgcataggtaggctaatttttctcttgaatagagccatagtacaaactccccttcatctgacatcactcaattatatcagaaaattgataattatctataaaaaattaaaatatttatcttttatagatgtcaaaaatcactaatttccatacaaaaactgtttacctcaaataattaaaattgaaggtactaaactgtttcaccagttatacgtcacactattttgatggtttataattttgattaaaatatttatgctttgcagttttcaaacttttcttagtctctgtatcaaagccttcaacaaataatcctttattagtactgattggttgcacaacataagttacaccaggttcatctttaaacgtaacttccttatagaagagaccttttttagcactatactctgttttttctgatttaattttatcttttagatttttctcttccaaataactgtcaattagttgaatattcttatggccttgatatgttttcagaccaaagaaaaatgctacagcaacaattaatgaaataaataatataatgataactttaatcgcgttttttttcttcttcattatgtaactcctttttgcttatctattcagtatgaacgaatcaatttatttaataaagagtttttaccagattgtaacaaatttttttattctcaatattattatagaaatcgaattacatacacgatgcttttaaaaaatttaataacaaatttcattttactatctatcaaaataattgactacttttaacaattaaggatgatacaattacatttttttcaatttaaaaaatcagtcatatcagtcattaccgatgaaaatactaagatatcgatatgttttgcattatttaacatttaaattcaattatagacaattcaataattgcgatgaaatcagtacttgacaactattacacttcataatattgtttattttaacaaggagtgattggatgtatgtagaaaacagctatcttagcaaacagttgtgttttttattttatgtttcttcaaaagaaataattaaaaaatacacaaactatcttaaggaatatgatttaacctatactggttacattgttttaatggcgattgaaaatgatgaaaaacttaacatcaaaaaattaggtgaacgtgtattcttagattctggaacactgacaccattactaaagaaattagaaaagaaagattacgttgttcgaacacgtgaagagaaagatgaaagaaacctacaaatttctctaacagaacaaggtaaagcaataaaaagccctcttgctgaaatttctgttaaggtctttaatgaattcaacatttcagaacgagaagcatcagatataattaataatttgcggaattttgtttctaaaaattttgactattccgacagaaagtaactccctatcataaggtgatgggcagaagtatgcatcgctatgtttattcattatctttattgcttgtataaatctcgatgctcagttcttttgccctgattccttatcaggcacaattctacccatttataacttttttacctccccttttactttatcttttttaatactactcatataatggctttgtaatacaaatttatataatggaagtgatgatattgaacttcaatcaattcgagaatcaaaacttttttaacggtaatccaagtgatacatttaaagatttaggtaaacaagtatttaattacttttcaacaccttcatttgtaacgaatatatatgaaacagacgaattatattacttagaagctgaactagcaggtgtaaataaagaagatattagtatcgatttcaataataatacgctcactattcaagctactagaagcgcaaaacacaaatctgaacaactcattttagatgagcgtaacttcgaatcattaatgcgtcaatttgattttgaagctgttgataagcaacatattactgctagttttgaaaatgggttattaactattaccttgcctaaaatcaaaccaagcaatgaaactacttcatctacatctattccaatttcatagttaaatttaaaatgaatacactactaaagccttaatgtcatgctacgaatattgcgcatgatattaaggctttgtatttaactaaatgaatgtcatgtattacatatcaaccgtttttcaatgagccatattctttttggtataaatgacgcatggtaaataatgcaatacatccaaataccgctaagaaaataaatgctaaatgacttgatcctgttaaattagctacgtatgtgattactagtggtgggaaaaatcctcctaaaccacccatcattgatacgataccatttgcggatcccgcttcatttgagaagtatgatggtactaatttgaagattaagccgttaccaatacctgcacaaatacttattgttaaacaacctacagtgaataatgcgatatggtctgaaatacctaaaataatggcaccgataatcataacaacaaaatcaatcatcaatactttaactgcattaaatttatcacctaaaatgccacctattggtcttaagaatgttgccagcgcaatgaatacacctgatcgaataccagcatctactttgtcaattccaaaatgatttactaagtagttaggtaagaaaataccaaatgctacaaaagcaccaaaagtaatgaaataccaataactcaagtaatataatttgtagtttttagataatgttttcatttgtgccattaatggcactttaattttacgttcttgtgtatcaccaaatataaacataattaatgcaaataaagcgataataattaagtaacttctaacagttgtttgccaaccaataatacccgcaattggcggtgctaaaaatgaagaaactgctgtaccgatattccccataccataaataccatttgctagacctactttttctttagggaaatatttaggaactgatgtaacgccaactgagaaaattgcaccacctacaccaaggaaaaaccctgacgccattaacatacccggtgtttgtgcttggcttaagaaaaatatcgggaataacaatacgataaaactagtaaagaatacccatttagcgccaacaatgtttgttagataaccaaatggcacacggagcaccgatcccaaaataactggtatcgctaaaatgattgatatttgaccttcagtaacattgacatcttgtttaataaagggcattaatggcgcaattatactccaagccataaacccaaccactaaacttaatgtctgtaatgtaagttgaaagccaccttttgttttgtacatacgtttcaccttcaccaaaatcatttattttttaatagatatcaatactctgcctatatattagaggtcaatgttatttaaaaatgctttcatttatatgaaaacattcaatatagacaaagtattgactacatatatattttattatgattgtgaaaaagtgaacataaggattttcccttatttatgaagtgatttaccctatacaatgtccctttaagatacttttagacacttattcgccatcattttaatcatattatttaggaacactcacatacttttctttaaattttttcaattagttacagttactgcttgaaaatcacgttacgttaccctttatgctgacaacataaggaggtttatcatgtataaaatcaatattattagatcagattccgtctataagaatatactcaaggcaccattaaacgatcgtgattcaattttcactaaagaaatattagtaccttttaaaaagaaatttgaagcacaacatatacctatttataatgatgccaaacagacaatgaatgcaaatcattttttaaatgcctttcaaattccacccaaagatttacgcatgtctgaccaaatatcaatacaatacctgaataatgatttctggagtaattgcgaaaaatatttaaaagttgctatagatcaattttcaaattatagtatctcatctcaagtttctaattatcatttcacagtattacttggagatagccaaaaaccacttatgtatctaaataaaaatcgcggtggtgatggtggcataccaggttatattatgatttatttagtgccgagtacaagtacaattaattctatgaaaagcttaattgcacatgaagtaaatcataatatgcgcaatcaatatattgattgggatggaggaagtttgattgaattgattattgcagaaggattagctgaaaactatgtagaatcattgtatggtaaagcgcatattggaccgtgggtaacaaatactaattggagtcgtgataacgtaaaaattaaaaatactatttataatcatttacatttaaaacatatatttgaatcgatgccttatctctatggtgatgaaattaataaacttcaaggtaggcctatcgttggcttatctcatgctgccgggtatgcatgtggctatcacttggtgaaatactttttacaaaaaacaaacatacctattgaagttgccacaacacttccagcacaaaaaataataaatgaggtgactgaattttggcatacacatacactttaaaagatattattgaaattacaggtgtaactaaaagaactttacattattacgatgaaataggattattagttccagataaaaatgataaaaattatcgcgtttataaacagcaagacttagaaaaattacaaaagattttaatactcaagtcttttgattttgatatcgctaaaataaaacaatacatttcatatgataatgaacaattgcgaaagttattatcagagcaagtaagcaagttagataaaaagatttctgacttacaattaattagactctctgtatgtgaatttattaaaggacactctctaattgataccagcattttaaacaagacactacagtcacaatatgataaagaagcatctataaaatatggtcatacgaaagcatatcaatcatttattagacgtaaagacagcttacaatcacaggatatcagacataaattgacaactatcttcaataaatttaatcatatgtctttgagtcattatccaatccaaaattgtagtgatctcgtatttgagtggaaggcatttatgaacactatcgctgattttgatgatgaaacattatgctgtattgccaaaacatatgaagatgatacgcgtttcaaagattactttaattcatatgataatcaaaatttagcatcatacatttcagaggctgttaattattttttgagcaatgtgaataagagcgacaatttttaatcctcatacagatgctacaacactgaatacaccaactaaaatacttgttcaaagtagaaaactaatcatttattctctaaatcaataactatattaaaagttatacctttgcaaagcgaattagtataggttaccgaaaggagaaggattaagttccattcgatttataaaaaaatatatttcgaaacatacaaaagcgccagaagataatcatttcctctcgcgcttttatactgaattatattaatttcaagctctaaaactctaataatttctttttcaatgcatattcaactagctcaggtttactctttaagccaagctttgtcataatatgcgtcttatgtgcttctactgttttcacagatacaaataatttctctgcaatttctttattcccgtaacctttggcaataagtggcaatatttctagttctcgttttgataagattttaaaaggatctgatgtgtttgcagtgtcctgatttgaattagatacaaattcattcactaaagatgttgtaagtttcatatctacatatgtttcacctttatatacagttcgaatagctaacaataattgttcatcaggtgcatttttcaatatgtaacctttcgcaccattacgcaacacatggaacaaatactcctcatcatcaaacattgttagtattagtattttagtttcaggaaaactgtcagcaattttactcgtagcgataagacctgactcacctggtggcatacttaaatccattagtaacacatcaggtttatattccattactttttggtaagcttcgacgccatctgcagccgttgcaacaacttccatatcattttgataatttaaaatcatagagaaccccgtacggacaacagcgtgatcatcggcaatgactattttcaattttattcccccaatgtatgtttcaaattggaatgttcaatgtaacattggtaccctcaccaattttcgtttcaatattgacgctaccgctgactaactcagctcgctcattcattccatataaaccgagtccagaacctttaggcttagaacttggatcaaaaccatttcccgcatctatcacttctgctaccaaatggcgcccagtttgacggatacctacatttatttcatttacatcagcgtatttcaacgcatttagaatagcttcttgcactactcgataaacaaccgtttcaatatcactatcaaagcgggtatttttaatatttgatgtatatatgatttttattccataattttcttcaaactgtttaaaatatgatttaaaagctgcttcaaggcctagatcatccaaagaagcgggtcttaattcaaccgacatattacgtatatcatcaattaatttagcgacaatatattcaatattttctgcgtcttccaaaagcttagttgtatcttcttgatattttaataatctcaattgaacatctacattgagcatttcttgaatcacactatcatgtaactctcttgaaattcgctttctttcattttcttgggctgagattgttttacgcatcatacgttgttgatgtaatttctcttgctgttcaatttgtgatgaaacattttgaagcgtaaatgcatgaattcccctgtcttgatcaatcaactgatatgttgctgtaaatggcatcactttttgatctttcgtcttcataaatacttggaaattcgtagcttgtacttgcatcgattctaagaaacagtctttacatgattgtacatcataggcatttgtatacccttcacatctgtgacaaatcgcattcgccacagcactgtaattatcttcttcagataatatatctttagcagcatcattcattgcaataattttaccgttatcatcagcaaaaactatcttttcgattgaatgctcataatattttttcaataaagtatctaactgtatactgtcctcattaatcatgacttacaccctaattcatctcattatttatcatcattgaaaataccaaacttacgttgaatatcatcattatcaaatatttttggtaaaggacgaccatctctttgaccaaataatagtacgccatacacttgattcttataccaaagcggcactgctaaaactgctgttaatgattcgctcaataaaattggatagtcaatcttttcttcaggccctaaagctaaaccaacattggctattaccatacgctttcctgttttcattacagttccagctaatccacgaccttttcttagaataatcaatttaaatcgattatttttattacctgaaacatagtgccattttattggagatgatggtttgttagattcatagaaagcgattgccgcaaaatcataaccctcttctttgcgtattttatctaatgtctcttgaaatctacgatcttcaattattgcttctggtgtcaaatcctttcacctcttatgcttacactttattcttacggtaaataatatatctgcgatttatatatgtcaaaggtacactccaaacatgcaccaaacgtgtaaatggccaacaagccataatagtgaaacctaacaatatatgcattttaaatgcaatcggtacaccactcatcaatgacgcatctggttttaacataaataattgtctaaaccaaattgataatgaagttctgtagttaaaatctggatgttgtatatttgttactaatgttgcataacatcccataaatacgataagtaataataagaaatttacaaatatatccgacgctgaacttaatcttcgaatacttttcgtagtaacacgtctcgctgttaataaaaacatccctaccaaagtaattataccaaagatgctcccaatataaacagcgcctatatgatataaatgctcagacacacccactgcatccatccatgatttcggtattaacaatccaactacgtgtccaaaaaacactggaataatacctaagtgaaataataaacttccccacatcaacctttttctttctattagttcactagatttagctgtccaagaaaatttatcataacgataacgtgcaatatgacctgcgacaaagacaactaaacataaatacggaaatataacccataaaaactgattaagcatgatgtttcactccttttggtgatgtcaaacataatttcaatgtttttctaagtgcttgaatcacataggcatatggattgttatcttcaccaagtgcattcgccatcacatatgttccatcctcaataatcataatgattaattgaatattctcttcagctcttggatcatttcgccattctgccacttgcaaaaattgaagcatcaacggtagataatcagaaagttcattatctaccatttctagtccaaacatttcatataatacctttaatttagctaacatttgcccacgttctttttgcgtatcaaatttgttatacgtcatatataatggtgcttttttcgtaaaatcaaatgtatctgtataaatcgctttgatttctgataatgaaaatgtcatcattacatttctaaatgctactaaatcttcatatgctggatgatctttcgaaattgtttcttcaaaagtttttggatgaaaagttaatttttctggaaaacataactgttgtgccatatatccaaaactttcttgatattttttaaaattatcgaaattaatcacggaaaatccctccatagaaattctcattataaatttcttgaccagttttccctgaacctactgcaacgccacagccttcacagttatctccaaaatgctcgccaccgtaattgtatcctgtactaccttgtgcgtgatacgtatctaaataggtttctttgtgtgatgttggaataacaaatcgatcttcatatttggctagtcctaataaacgatacatgtctttagtttggcgctccgttatacctaatcgctctaatcgagacgtgtcaaatggctgttgagtaacttgagatctcatataacttctcatcattgccatacgttgtagggctccttttactggttctgtatctcctgcagtgaaaatattagctaagtattcaattggtaaacgcatttcttcaatggctgggaaaatcgcatctggattttgagttgtatttttaccttcaaaatagctcataattgggctaagtggtgggcaataccaaaccatcggcatcgttctaaattcaggatgtaacggaaatgcaagtttatattcaattgctaacttataaattggagagttttgtgcagcttcaatccaatcgtaaccaataccatctttttcagcttgagcaatgacttcttcgtcaaatggatttaagaatatatctaattgtttttcgtataaatctttctcgtctactgctgaagctgcttcatgaactcgatctgcatcatataataaaacacctaagtaacgcatacgtcctgtacaagtttcagagcataccgtaggcatacctgcctcgattctcgggaaacagaatgtacacttttcagctttgttcgttttccaattgaagtaaactttcttatatggacaacctgtcatacagtaacgccatccacgacatgcgtcttggtcaactaatacaatgccatcttcatcacgtttatacatagcacctgaaggacacgatgcaacgcaacttggattcaagcaatgttcacataaacgtggtaaatacatcataaaagtttcgtcaaattggaatttaatatcttcttctattttttggatgttaggatcttttggacctgtaacatgaccacctgctaagtcatcttcccagttaggtccccattcaatttcaatgttatcccctgtaatttctgaatacgctctagcaactggcgaatgcttccctgatttcgcagttgttaaatgttcataattatagttccatggctcataataatctttaattaatggcatatctgggttataaaaaattttacctaaagcaatttttgaaattctacttccagattttaattcaagtttccctttacgatttagtacccaaccacctttgtagtgttcttggtcttcccaacgtttcggataccctacacctggcttcgtttctacgttgttgaaccacatgtactcagcacctggacgatttgtccaagtgtttttacatgtcacactacacgtatggcatcctatgcatttatctaaatttaataccatcgcaacttgcgctttaatcttcaagccaattaacctccttcatctttctaactgctacatataaatccctttggttcccaattggtccataataattaaagtgataactaatttgtgcgtatcctccgactagttgtgttggtttcaaatggattctagtcggcgcgttgtgtgaaccaccacgtgtatctgtaatttctgacccaggcgtttgaatatgtttatcttgtgcatgatacataaacattgtacctttaggcatacgatgcgaaataactgctcttgccgttacaacaccattacggttatacacttctagccaatcattatcttggatatcgtgtttttcagcatcttcatttgatatccaaaccgttggaccacctctaaatagtgtcaacatatgcttattatcttgatacattgagtgtatattccatttaccatgtggcgttaagtatctgagtactaacgcatctgtaccacctttaattttcttatctctattcccaaataccattggcggcaatgtcggtttatatactggtaagctctccccaaattgttggaaaacttcgtgatccacataataactttgacgtcctgttaatgttctaaaaggtactagacgttctatattcgttgtaaatggtgaatatcgtcgaccttctttatttgaacctggaaatactgctgtcggtattacttctcgtggttgtgaagttatatttaaaaacgaaattttctcagcagcgcgttcgctagaaatatcttttaacggcattccagtttgttcttcgagatcttcataagatttttgtgataatttaccattcgtagcagatgaaatacttagtattgcatcagctacattacgtgctgtatcaatacgtggacgattcgctctcacagaatcatcatttgtatcactccacgtacctaacatactttttaattcttcatattgttcactgacaccgaaacttacaccatgtgctccaactttccctttttcaagtacaggaccaagcgtgacatatttgtcgtaaattttagtgtagtcgcgttctacaattgcaaagttaggcattgtacgtccaggtaccgcttcaatttcacccttcgaccaatctttcactacgccgtatggtgttgaaatttcttgcttagtatcatgactaagtggcgttgtcacaacatctttaaacgttccaggtaaatagtcttttgccatttctgaaaatgcttttgccaacgttttataaatatcccagtctgaacgcgattcccataatggatcaatagctggattaaacggatgtacatatggatgcatatctgtagatgacaaatcatgcttctcataccaagtcgctgctggcaatacaatgtcagaatataaaggtgttgctgtcattctgaaatctaaagaaacgactaaatctaatttccctgttgtttcctcacgccacgtaatttcttctggcttttcatcttcatttggtgtagctaataaccctgattttgtgccaagtaaatgcttcataaagtattcttgaccttttgcagaacttgagattagatttgagcgccatataaacagtgatttcggatgattctttttcaaatccggatcttctatcgcaaattgcgtttgttttgacttaacttcatctatcgcgcgttttaaaattgcctcattcgactcaatgccttcatctttagcttcttctgcaaacaacaaactatttttattaaattgtggatatgatggtaaccaaccaagtctagctgctaaaacattataatcagctggatgttgatgctttaactcctctgttttagctaatggagattttaaacgatctacatttgactcttcatatttccattggtctgtcgcaaaatagaaccaacttgttccgttttgcaaacgtggtggtccttgccagtctttcgcaaatgcgacagtactccatccttcaatcgggcgacatttttcttgtcccacatagtgagcccaaccgccaccattcacaccttgacagccacataacataactaagtttaagattgaacgataaatcgtatctgagttaaaccaatggttaatacccgcacccatgataatcattgaacgcccttcagtatcgatagcgttttgcgcaaattctttagctacttgaatgacaacactttgttttacgcctgaaatggcttcttgccaagcaggtgtatattttgattctgcatcgtcgtatccttttgattctaatttatgatcaaaacgacgcacgccatattgacttgccattaagtcaaaaattgtagcaatacggactttgtcaccatttgctaaagtgacttgtcgagttggaattggacgattgaatatcccatctccatcactatcaaagtatgggaattgaattgtttctaattcgtatccaccttctgtcattgataatgtagggttaattttagaaccatcttctgtttctagttttaagttccacttcttaccttcttcccaacgttgacccattgtgccattaggtactactaaactatcgctaattgcatcatgaataactggcttccattcgccttgctctgttgtttgacctaagtcactcgctcttaaaaatcgacccgctttatatccattttcatcttcatccagcatgataagaaacggcatatctgtatattgtttggcgtaatttataaagcgttcattaggttgattaacataatgttcttgtaaaataacatgcgtcattgcttgtgcaattgcagcatctgaaccaggattcggtgctagccagttatctgcaaatttcacattttctgcgtaatctggtgctactgaaataacttttgtacctttatagcggacttccgtcataaaatgtgcatccggagtacgtgttaaaggtacattagagccccacataataatgtatgaggcgttataccagtcacttgattcaggcacatctgtttgttctccccaaatttgtggagaggcaggtggtaaatctgcataccagtcataaaaactaagcatttcaccaccaagcaaattgatgaatcgagcacctgctgcataactaatcattgacatcgctggaataggtgtaaatcctgcgattcgatctggaccatatttttttattgtatacagtaattgtgctgcgattatctctgtaacgtctttccaatttgaacgcacgtgccctcccatacctcgggcttgcttatattgtttggctttgtcttcattttcaacaatagacgcccatgcagcaacgcgattaccattgttttcttctaatgcttcagtccataaatcccagagttttccacgaatatatggatatttgattcgaagtggactgtattcataccaagagaatgacgcacctcgtggacatcctctcggttcatattcaggcatatccggaccacaacttggatagtcagtttgttgattttcccacgtaataacaccatttttcacaaatactttccaagaacatgagcctgtacagttaacaccatgtgttgttcttacttctttatcgtggctccaacgttctctgtacattttttcccattctctacttttactttctaggatcgaccaattcccattaaatttttctgttggtttaaagaaattcaatccaaattttcccatatttatatcctcctacgtataaaaatacgatgtgtagatgtcgtgtttttaaatactttaaaatgcccaagactattgctttaattagattgtacattttttcacaaatataaaatattagggaatcacctaattacttaaggaatttccctatcaataacgggatttcattgaaataatacacaatcatgtatggtcatgcttattgccaatctaaatcgttcaaatttggcacaacgacaaataaggcttcaacacgaatatattctctcggttgaaaccttacttattcatttattttttataaattagtgacacaacactgtattagcatctgcacgatcggttgaaatatatgttacattttcttgctgcttaataaatgcatcatagtaatcatattgcgacgaatgatatgtgccattcgatgtatcatttgggtttagcaaacagccataaccttcgtcatataaatgttcacagagcataagggcgtcatgtttagaaccacttactacataaaattgcttcgcaggatcatatgatttaggagtgttttcagtataaccaacaacttccccaataatacatatccctggttttgcctcaattgaatagtgttgcaattttaaaataatattacttaaacgccccttaacaacaaactcgttaaaacacgatgcttgaaagacaatcgctatcgggtaatcaatatctgtgtattgttgtatctgtgtgataattttccctaaacgttttacccccatataaattgctaacgtgccaccattcactaaggaattaacatccacttcattttcttctgaatctttaaagtgacctgtagaaaatgtcacacttttagcaactgtacgcattgtcaaacctgtctgcatagttgcaactgctgcgctcgctgatgtcacccctggtacaatttcaaacgcaatatgatgttcatttagtgtgtctacttcttcttgcacacgaccaaatatcgctggatcgccacctttaagtctaacaaccttgttataacgacgcgctgcttccacgatacagtcatttattttttcttgctgaatatgttttgcatacggctttttaccaacatcgataatttcagtagtcaaattcgcatattgtaaaatcaacggattcactaatcgatcatatagaatgacatccgcttcacgtattaaacgctcagcctttttagtcaaataattcggattacctgggcccgcacctatcaagtaaaccttgccatattcatctacagacatatatatacgttcccgtctgtaacttctacctcataaacatctacacaaccttcatcaggttcttgaacaatacctgtatttaaatcaattttttgatcgtggagcgggcaaaatacatattctccactcactgtcccttcagacaatggtccttgtttgtgtggacagatattgtgaatcgcatgaattttgccactttctgttaaaaacaatcctacctctttgcctttgacaataaccttttttccaattaggggtgttaattcatctatagttgtcactttaattttttcttttgtttccatgtattacaccttctccacttcaaaaattttacgtgcttgcgcattgctagttattgcttcccaaggttcagcttcgactgcttttttagcatccataatgcgttcaaatagttcattttgtctttctgggttaagtaagacttcttttacattttcaaatccaagtcttcttaaccatggcgctgttctttcagcatatatacctgtttcgcgataatattgcatcaaagcaccacataatttgattacttcatcttctgtttctacagttgttaaaaattcagctttttcaacttctgtaccaccattaccaccgatatagatttggaatccattttcaactgagataataccaaaatctttaacacctgattcaacacaacttcttgggcagcctgatacacccattttgaatttatgaggtgtatcgatgtattcaaatgttttttctaaacgaatgccaagtcgtgtcgtgtattgcgtaccaaatcgacaaaactctttaccaacacagcttttaactgagcgtgttttcttaccataagctgatgctgaacgcatacctaggtcttcccatatatttggtaattcttcttttttaactccatacaaaccaacacgttgtgaacctgtcactttaactaatggtacatggtatttcttagccacttctcctagacgaatcagttggtctgcatctgtaacacctccacgcatttgaggtataacagaaaatgtaccatcattttgaatattcgcatggtaacgttcgttagcaaatcttgattctctttcatcttcatgatcatgtggataaaccatgtttaaataatagttgattgctggtcgacattttggacatccacctttatttttaaagtttaaaacatgtcgaacttctttagatgtttttaaacctttcgctcttatttgcgttacaatttgatcgcgtgtcaaatcagtacaaccacatataccagcaggttttgcggcaacaaagtcatctcctaaggtgtgctgcaatatttgagcaatttgcggtttacatttaccacatgaattccccgcttttgttttagccgttacttcttcaactgttgtaaagccattttccgtaatagcatttactatagtacctttatcaacaccattacaaccacaaattgtttcatcatcagccatatcagcaattgatagcgatgcctcttctccacctttagtaagcaatgataccagtgtgtagtcttcagtagattcaccttttttcatcatgttataaaagcgtgaaccatcatcgatatcaccatatagtactgcaccaactacattaccgtcttttaaaaagatttttttatagttattatcaacgctattaaatatttcaatacctttaatttctgcattttctacaatttgaccagcactatacaagtcacaaccagaaacttttaatgacgtaaatgttgttgatcccttgtatccgttcgtttctttatttgttaaatgatcagctaatactttaccttgttcatatagtggtgcaacgagtccataaactttgccgttatgttctgcacattcaccaactgcatatacattgctatcacttgtttgcatcacatcattgacaacaataccacgattaacatctagacctgattctttggctacttctgtgtatggtcgaatacctactgccataacaactaagtctgccggaatctcgcgtccatcagccaatttaacaccttcaacatcatcttctcctaagatttcagttgtgttggcttgcatttcaaacttcataccttgcttttctagatctgctttaagcatatttccagctttacggtctagctgcatttccatcaaccattcagctaaatgtaacaccgttacttccataccttgatctaataaaccacgtgcacactctaaacctagtaagcctccaccaattacaattgctttctttttagtcttagcaatgttcatcatttgttcagtatcatcaatcgttctccaaccaattacactcggtaatgtcgaacctggaactggaatgacgaatgctttagaacctgtcgcaaaaatcaatttatcgtatgatacttcaataccatttgcagtagtaactgattgatttgctctatctacttcaattacagaatcatttgtaattaactcgataccatgttcctcataccactcatatggattcataattgtttcttcaactgtcattttattttgtaaaatatttgaaagcatgatgcggttatagtttggataaggttctttaccaattaccgtaatatcatataaatcgttggcgcgctctaatatttcttcgattgttcgaatgcccgccataccgttaccaatcattactagtttttgctttgccataaaatatgcccctttacttcataatatttatttcaaaaaggttttaattttcgtttgtgcttttatattttcattggagtcattaagactttctaatctatcattaataatttgttttaatatcgggtcgaagttaattgaaggtgtgatgtgtatatctggattaataaccatgttattcatttgctgcttcactttgttaacaagtcttccgtcatataaaaataaaggtacgacaatcaatttttgataccgtttcgagatgatttctaaatcatgtgtaaaactaatctctccatatagcgttctcgcatatgtcggcttgctaatttgcaaattttgagcgcatatttgtaactcttcgtgtgccttagtaaactttccattaatattgccatgtgcaacaatcataactccaacttgttgttcgtcacctgctaatgcgtcacaaatacgttgttcaattaatcgtctcattaaaggatgtgtgccaagtggctcgcttacttctacctttatgtctggataccgtcgtttcatttcatgaacgatatccggtatatccttgagataatgcattgcactaaagattagcaatggtacaattttaaaatggtcaaccccactttgaaccaacgtcgtcattaccgtctctaaatcctgatgctcactttctaaaaacgcaatatcatagtgatgtatatcatcttttactaattcagaaataaatgctaataacgcttgattctgtcgtccgtgcctcatgccatgtgcaacaatgatattcccattcacatttaccaaccctttcacacgtattgtataccaaatcatttcgtttttgtgaaaagaatcacattataatgtaaaatcagggaattccctgatgcctgtagtcatgcatattccttatacatttttcctttttgttaaatcaaaaaaacgaccgatatatgaatccctactcaacattcatttgagcaagcatcaatatatcggtcgcttgtagtgtatattattatcttaaaatggtggttggcctaatattgtttcgtcaaagcgctcaggtatcaatactttgcgcatgatcacacctaaatcgccatcatcattttcatgttcgctgtatatttcataacctcttttttcataaattttaagtaaccacggatgtaatcttgcagatgtacctaaagtaactgccgctgacttcaacgtatctcgcaaaaatgcttcttcaacataagtaagtaattggctaccatagcctttcccttcatactcaggatttgtcgcaaaccaccagacaaaaggatagcccgaaatgcttttcacacttccccaaggatatctaaccgtaatcgtagatataatttcatcatcaattgtcatgacaaatgtagtatttttatctatattttctttaacagcatctaaattagcattaaccgaaggccagtcaattccaagttctcttaaaggtgtgaatgccttatacattaactgttgtaacgtttctgcatcgttttcattcgccagtctaatcgtagtgtttgtcatttcaatccccatcactttctttttatttggaatgcatcatagttcattcaaactaaaaatccccttatagcgtaccaacatttagcacatgtgtcagataacatgcctcatctaaataagataggcatgcgataatcggttatttcattattgactgcatcagtaaaaaagtctatgacatgaattaatgatatgtacgcttcaaacctttcatttttcaatgtctactttgaagcgtgcagttcataatgtcctagactctacaatgttatattggcagtagctgactgcgggcccaacactgaagctgacggcaggccagcttacaataatgtgaaagttggcgggccccaacatagagaatttcaaaaagaaattctacagacaatgcaagttggcggggccccaacacagaagctgacggaaagccagcttacaataatgtgaaagttggggaacgggcccaaaaaggatgattctaaattcattgttgtcacaacatcttcaattatgactccattactgttgctctaaacgattgcgtttaccatttaaaaatgcataaacaagtcctacaaaaataccgccacctacaaagttaccaaggaatgcaaaaacgatattttttaatacatgtaaccaagatacagcatcaaggttgaagaacaccatacctgcatataatccagcattgaatacaacgtgctcatatcccatgtatacaaagactataacaccacaagcaatgaagaatgcttttgtcaatccgcctttgaattgcatagaaataaaaataccgatattaataaagaagttacagaaaataccttttgtaaaaatattcaaccaagtcgaatcgactgtctttttctgaactaaggcagttaaggcttgtgtcatttctggtgtcataacatgtgcatatttcattaagaagaataatacaaaaccacctaaaatatttccaaggaaacaatataataaaatccacatcatcttattaatagaaacaactttataataccagccaactgtaaaatacataaaattacttgttaataattcagaattcgttagtacaactaagaccaatcctaagctgaaagcaattgctcccattaaattaatgagaccatcaacatgtgtaattgcgaattgtgttttaataccaaacataaaaacagtaacaatggacaataagaaacctgccatcatagattttagcatgtatcgtcctggtgtttgctgtaccatcacttgtttcatttgaacagatgatgatattgagtctacgattgctttagttgaatacgtatcttcaactgttttattattttttatcacagcacttcccccatttactattatcaaataaattttacctattaattatattagtatttagatgtaattaatagattaaaattcagaaaattctttttaccaattcaaaactaatatttactcataaaaatagcgagatagatatcgcgacataaaacaattggtatcattttaattgcgctcatctcgctttatgtaagtattacttattcttttttaaatttgaaaagtaatgtaaaccatatgcaaatataccgtagcctacgactgtacgcaaaataaatctaacaactttatttggtacacatttcgaagtaacagtaattgaagataaaagcgtagtaaaaatatataatattaatactttaatgtaacgttgtgccatcgaatcatccttcattcaattaataatattacgttattattataaactgaatggcatataaaattttttacatattttcaacaactttatttcaataaagcatcaagttgatctaatgtttgattcatcccttgctcaacacccatgtttatgacttgttgagcggcttcttttgttggaaataccgatgttgatgtcactgtcgttttcgttgtattgaactcggaaaatgacaaagtaatcttcatgcttggcatttttgtatcttttgcaccttgaggtgtcgcaaatgagtcaatatattcaattaaatatggacgcttaaccgttttatattctgctaatgtatagctggtcattgtaggtgttttaatcgcgtaaaatgcatcaccgcctgaaacagcattaaagcgaaacactttggtactagcgtcttttggatgaaaccatttttcaaataatgcttttgtcgtataggcatcaaacaccttttcaatcggtgcttctatcgttcttgaaaaaataattttattatcttcaactttaatcgtcatcttcccactccctatcttttatatttactcatcttaacatgcattgagtgacatatgttaccaaatcatttgttataaactatagtaatattaatcattccctctgttgaaattgataactacgaaataaaaaacacactctattcagctattaacagttgagtagagtgtgcaaacctgttgaattaatgcgctaacatttcttctttgatttggtctttatttaattttgaaggataatatgttggccagttatccatttcttttaataacgcgtcattatcattacccataaagatatggaagtgttctgcctttttaggtgcaatgttgtgatcgctaaattggatgaatttcggtaagtctttatcattaccatcgaccaatttaaacataaatctcacgccacggttacctttaggatatttcaatgtcttcttaccattgtattcatatttaccagtgtgtttcttaccatctttagtaaatgtaatttcatttccttttatatcaatgttagtaatatcagttttatatcctttgtcataataagcttttaaatctttagcagattttttcggatcattttcagctttatgttccatcacttcatcaagcgtaccgtcttttaagtaagggtaaacagattgccattcaccagcataatcgcttaattcacggtctttaacttgctcatctttaaaatacccatcagaaattgctttgtcgtgtttactttcagctttgtcgtctttcactttaacaccactgtctaaagctttaccgatattttcaatattcgatttcattaatgattgatacgtaatattatcttttttctgttgttctttatttaaagactccatgttgtagaattttaaaggcttcgcatctgtttctttacgaattgtttcagtcactttattcgcaacattatcttcgtaaagaatatatttagcattgctatctctaatttctttaacaattttagttaattctttttgtgatggatcttcagcattcatgttttgaatacctttttgaacaaaaccataacgatcagctaagtatccaattgattcatgtgaaatgaatactgcattaccttgcttatcttttgtaacttgcttcatatcgttatcaattttcttaagatcgtcgtttaattttttgtagtttttctcatagtcatctttatgttttggatcttttttcactaattcatctttaatttctttagcgaaagtttggttaattttaggatctaaccatacgtgtggatcatatccaccatgatgatgatgatgttcttctttctcatgatcatgtccctcatgttcatgctcttcaccatgttcgtgttgatcagttaaaagctttgctttatctaatttatcttctaaagacagttttttatctttatctttgatagtagatgcaactttcttagcaaccggatctaaattatcccctgtatacataaacaagtctgacttgcttgcgcttaatatatctttttgtgttggttcatagctatgtaaatctgtccctgctggatagattgatgataccttcacgtgttttccaccaatttgctctgcaaatgattgcaatggataaactgtcgttttaattgttaccttgccatctttatcttttccatcatcattcccacatgcggctaatgataaagttacggctggtacaagaagtaacatacctaatttctttttcatagtcaccctcctaaatagtaatctttacgttttaaaattatatactcatgctacttaaaatacaagcactgtttttataaataatataaagtcgaatcatactttaggtatttaccacttttcgttttatctaatacatgactattgtacaaatatgatacagaaaactttatagtatttacgaacgtcgtaatataagaaaaaagacaatctctatcatattgctaatagaaattgccttttcatattgtcctaaaataacttgccctatttttatagtgtgacttttagatttaataatggtatttacatgatgctatttttatatgattgtcatctactttataaaccaatctatgttcgtgattgatacgtctactataatacccagtcagattcgattttaacttttcaggcttacctatacctttcaatgcgccatttctgtcaatacttttaagtaactcattaatcttcttcaccatttttttatcgttctgctgaaaatacttataatctgcaaaggcttgaggcgaaaacgtaatatttaacctatccattatacatctatatctttcgttatagttttcccacgttctagatctgcaattgattgagctaagtgttcagcattatttggattctgttggaggtaaagtgtttccatcatggagttataatctgattctgacatgattactacgtttttatcatcagtagatgttacagttaccatatcactatcatcatttacttttgtcataagtgcctttaaattctgtcgagcgtatgaataatttttaataatcatatttatcgcctccttttaacacaccccaattgtacaaatatttgtacaataaaacaagagacacagaaaaaactactaatcaagattttgcacggagaagaattaatacctatcctgtactgattacctactaaacaatgtttacatgataatttccacctatttagacttcatacattaaaaagacaatctctatcatattactaatagaaattgcctttcatattgtcctaataaattggtatcacttacttatctcaacaattaagactatttgattttatcttttaataatttttcataactttcataatcatatggatcttcaactttctcgccattaataaatgcagttggtgtcgtttttatatgattatctttagctatttttttatctttctctgcagctttccaagacttgctatcttttgtcttgtaatcttttataattttattttccgtctctttatctaaatgcagttgtttaatatgcttatctaatagttcttttgttaaccattctttattttcatcttgctgggcagcaaataattgcttttgaaaatctaaaaatgatttaggtgcatacatcaatactgcatgactcgcacgcgaaccaacaattgagtctttacctaagaaagctaaattgacaaattggtattccactttgtgattatctatataatttttacgcaactttggcatgactttttcatctaattctttacaataaggacatttatagtcgccatatatgacaactaatggtttgccgtttttcgaagatgtcgttgctgattcttttttaccgcaagctgttaaaattaacatgctcactataaataatgttagtaattttttagtcataataactcctgttcatatctagttcgtcatattttcttcatgataatccgcatcatgttgttgataatatcgtctcgaatcaaaatcttgcttatatgatacacgtttatcactaaaatcatatgcataataatgcacttcatcatcattactcaaaggtttataagctaaaatgataattttatccttatcatagacataaatattagcatctttgcgttcaaaatgatcaacacgatcaccgttgccttttttggcaagttgttcttgtttttgattttgaattttaactgcttcatctatttctttcacatatttatcattaccacatcctgatataaagactagtaataataataccgtcgccacaaatcgcttcaatgctcccactcctactatcaacttccaactaactttcaatataattaatactatacaccgtcaaacatcaatgcgctacaactactaccaatgcatttaatataaatatccaaagaaataacagttatgtatagtcaaagaaaaatatatttcattttctatgtgtatttgcaatcagtttttgataaaataaaaaaatagcattattaataaattcaaaaattacagttcaattcagagagggatgggataaaatgaactttgtaacgttgacttcggatgagttcaatgcgtttacaacaaagcatttttcacattacacacaatcagctattcattacaatcatagagttgatttaaaaggcgatgtgcatcttgtaggggttaaagatgacaatggtcaagtgattgcaggatgcttattgacagaagcacgcacacttaaatttttcaaatatttttatacacatcgcgggccagtgatggattatacaaatcaatcattagtagcatttttctttaaagcattaacgtcatatttaaaaaaacaaaattgtttatatgtccttgtagatccatatttaattgaaaatttacgcaatgcagacggtgaaattgttaagtcttatgacaaccgagcatttgttagaacaatggacacattaggctataagcatcaaggttttccagtcggttatgattcaatgagtcaaatccgttggttatctgtattagatttaaaggataaaacagaagaccagttattaaaagaaatggattatcaaacgagacgtaatattaaaaaaacatatgatattggtgtcaaaactaaaacgttaacgattgatgaaacgcaaacctttttcgacttattccatatggccgaagaaaagcatggtttcaaattccgtgagttaccatactttgaagaaatgcaaaagttatacgatgaccacgccatgttaaagttggcgtatattgatttaaacgagtatttaaaaacgttacaattaaagcaacagcaattaacagctgaactctcaggtgttgaagaagcattggaagaaagtcctaactcaaagaaaaataaaacgaagcgcacacagctagaacaacagttaaatagcaataagcgtaaaatcgacaatacaatagaacaaattgaacaagatggtgcagtcttaaacttagcttctgctttgtttatctacaatgagcatgaagtttattacttatctagtggttcaaaccctaaatataatgcttatatgggtgcctaccatttgcagtgggaaatgattaagtttgctaaagcgcatcatattgatcgctataatttctatggtattaccggtgacttttcagagtcatcagaagattatggcgtacaacaattcaaaaaaggctttaacgcacatgtagaagagtatatcggtgactttattaagcctatcaaaccattactatataaggtacaaacgtacttaaatcataaacgtcgataacaggttgctccaagattttggcaatataacaaagaaccacgcatcatgtatatggctcgccatactaaaacatgatacgtggttttatttgattattcttcatttataacatttaagaaacgtcttaattcttctgttttcggacgattgaacatctcttctggagccccttgttctccgatcatgccttcatgaataaatacaatgttattagatacttctttagcaaaacgcatttcatgtgtcacaatgaccattgtcatgccttcattagccaaatctttaataacctttaaaacatcattcacaagttcaggatcaagtgcagatgttggttcatcaaacaacatcactttagggttcattgctagtgctcttgcaatagcaacacgttgttgttgaccacctgataatgcatgtggacgttgatctttgacatgtgttaaaccaactttctcaagtaactcaagtgatttcccacgtgcctcatcctttttcaactttttaactgtgataagaccttccattacattttctaatgccgtcttatgcggaaaaaggttataactttgaaataccataccagactgtttacgaacttctatttgtgattttttatctttagatgtatatgttttgccgttaacataaactgtaccttcagttggaatttctaacgcattaatcatacgtaacaatgttgttttgcctgaaccagatcgaccgattaaggttacaacctcaccttgttcaacagataaatcaatacctttgatgacttcaacatcattaaatgatttatggatattgttcaattgaatcatgagcgataccctctttcaatataagattcatagataccttggataattgaaataataaagcataccacccagtacattagcgcaactaacacataaattgttaaatattcatatgttgtagacgcaacttcttgagcttttctaaacatttcagccactaaaataaatcctaataatgatgtatctttgattaaacttaaaaatgtattacctagtgcaggaatcgacactcgaattgcctgcggtaaaatgatacgttgtatcgtttgaccatacgtcataccgatagaatatgcagcttctgtttgtcctttcggtatagaaataataccgccacgaataatttccgaagcatacgcacctacatttaatgataaaccaataatagcagccactacaggtgccaatgtccattggttgtcagcgtcatttgttaataatctacctaattctggaataccataaaatatgataaatagttgtactatcattggtgttcctcgaataatagatacatagacacgtgaaatacttcttaaaattttactcgttgaaattcgcattaatgctgtaaataatgcaataatcaatcctaaaacaaatgtaactaatgtaataggaattgaatatttgaccaaaccttctagcataggtccgaaagcttgttttgcagcatctagcgcatgttgttgttcgctatttagatttagaaacatcttgaccaaaccatttcttacctattttagctaattcaccgttttcctcgatttttttcaagccatcattgaatttttgaactgtttcatcatctacttttttagaaaatgcaaatgcagatctactttgttcagcattacctttgattgctttgatcttagcattaggtttttgttttttataatccaagtatgacagactatcattaaatgtaccatcaacacgcttagacaataataaatccattgattggttaaagccatcaacttttgtaatatcagcacctttatccttagctaatttaccataattagatgtaaatgtttgtgctaacttcttacctttaacatcatcaaaatctttaatatctttttcattttcacgaataactaaaacagcacttgagaatgtgtaaggcttagaaaatttatatttcttttctctatcaggattaatacctacttggttcgcgattacatcaaaacgccctgcgtctaaacctgcaaacatagaatcccaagaagtttcattaaatttaagttttaaaccttcttctttagctactgctttaataacatcaatatcgtaaccagttaatttaccatctttatcatggaaactaaatggtgcataagtcccctcagtaccaacattaattgtcttgctatctttattagcttccttgtctttcgacgaattgtttccacatgcagctaatatgaaaacgaaagctatcatcacaaataaaagtcttttcatggaatatatctccttattcttattattctaatcggaataaaaatattttaatctgaaatgccggataagtcaatatgttgaactttcgctaaaaagctttatatagctagcaacttatatttattgacgagaatcaacttcttttttcttcccttgtaacataaatgaacaaaagaaactaacaactgtaatcaataatgcaaataaaaatccagcgtgataaccatgcaacatcgtatcaactttaatttgattcatcatatcaattttgttcatgccattatagtctgacatagttgaagaaaagtttttgcttgcatgagataaaatagtaattaatgcagctgttccgatagaaccagcaatttgttgtactgtgtttgtcatagatgaaccgtgtgcattcatttctggctttaattgattcatcgtatgggtcattactggaattaatcctaacgcgataccaaccattcgaatcgcataaactgttgccaacatgattgttgatgtttgttcatccattacaacaaaataagccgtagtaataacaacaatcgtcatacctactaaagcaagctttctaggaccaaacttttcatataaagcacccgaagtcatcgacataaatgccataacaattgctcctggtaataaagttaacccagaatctaaagctgaacgatgcaataaattttgcacaaagataggtaaaatcgtttccgaaccaatcatcgataccattgtgacacccataataatgataccaactgtaaattgtttatttttaaatacagcaaaatttaataatggtgttgatagtcgatattgacgtaatacaaataatgcgactaaaacaataccaccaatcatagatactaatacgataggattatcaaaacctttttctgaaattgaactcgttccatacaataccccaccgaaacctagtacagaaaaaatgacagaaataaaatcaataggtactttaattgtagttccaacattttttatcgttttaaatccaattaaaaatgttacagctgcaattggagcgacaacatggaaaagcgatctccagttaaaatattcaacaaggtaacctgaaagagtaggtccaatagctggtgctaaaccaattaccaaaccaaatatccccatatatttaccgcgttcgtgcggttggaacacatccaaaatcgttgtcatcatcaatggcatcataatacctgcacctaacgcctgaataattctagcaactaataatgttgcaaagtgcggactcaaaccgccgagtaatgtacctaagaaaaagatagaaatacccactaaaaacacttgtcttgttgtataacgttgtataacaagcgcggacaaaggaataacaatcccattagtcaataaaaaagctgttgtcagccattgaacttgtgtatatgaaatttcaaaatctttcataatacttggtaaagccgtcactaatagtgtttcatttaataatccaaaaaatccacccatcagcatagtaataatcatcgttaatttttgtttcttcgacatttaaagcttccccctcaccatctaaaaaacgacactcatttttagatatccggtaattatacccattttcaaaaaaattagcacgactttattacaatttctttaaaacgtaatcattactatttacatatgagtagttatcggtcataatatatttacaaggagggatagagatgaaattagatttacagactgctcgtcgtaatttaaatagccctaacattaaaacaagaaagcgtgctttaaagattattaaacaacataaaagagcgaaataattgttttaatttgactatattgtatgtctaactatattttcgagtatccctagctcgttaatataaactctatacttaactatttccttacattacttcacatatttaagagctgcatatacactcactccttgtgtacatgcagctctttttttataagtagtatttatctataacttctaaatcatcggttaattcataaacaagcggtgcacctgttttaatttcataattaatgatatcttcatctgacacatcttcaagatatttaatcaatgcgcgaattgaatttccgtgtgcagaaactaataccgtttgaccatctagcaaatattgtgaaatatgatctgtccaaaatggtatcactcgaactaaagtatctttcagactttcagaataaggcatcatacgtttatctaaatgattatatcgacgatcagctaagtaagcttcacgttgttcttcggtttcagcaggtggtttcacatcataagaacgacgccaaatatgtacttgttcttctccaaattcttttctagcatcatctttatttaagccttgcaatccaccatagtgacgctcatttaaacgccagcttttatatacaggaatccattgttgtttagattcagttaaaatataatgcgttgtatctaaagcacgtgttaataacgatgtaaaagctacatcgatggcaatgttattttctcttactttttcacctgctctagtcgcttcattaataccttgttcagataaattaacatcttcccatccagtaaataagtttttagcattccactcgctttgtccatgacgacataaaattaattttggcataacttataacctctttcctttaatctttaggacgttatttcagggatattttaagatgatttaatcttagcaattttcttttcaatatattttaaaattcaatgattaaatcaattatcactagacattaaatacataaatcctattccccattttcattttttaattcataaatgaatcaataaccacctaataacaaatcatattatacacctttgtccgctatttttctaaggtttaaaaaatatttttaggcgtgcctaaaaataaatgtaatagaaacgcctcctcagatatttatatatctatgaagacgtttaaatacattatagatggtctggttctgggtgaacgtatactgaggaaataccttttttgtgcaaatgatgttcgacattgtcacaaatttgatgcgcttctactaaggaaaggttagcatctacaacaattgtgacatcaataaacacactacttccatggtaacgccctttaatacttttaacttcttgtacttcatcaacttctaaaatatcattgcgatacgcttctaattcagtttcattgaaaccatcactcaacataaaaattgcttctttaaaaataccaaaaccagtataaacgattagtaagcctagcaatgttgctaaaataatatcgacaattgggaaaccgatttgcgtaaaaattaatcctatcgccgttccaatgctgactaaactatctgataaattatctttggcagcagaatttaaagaactacttttcgttcttttcgctagtctttgattgactgcaaatacaatcaacattacaagaccactgattaagctgacgataattgttattgcgttaggtacaacgtcatcttctttgaacaaacgaggtgcattttgaataactacttggatacctacaaacataatgacaaatgacaccaataatgaagaaatattttcagacttcaaatggccataaggatgatttcgatcggcaggtttaattgaaattttcaatccaataataacagctaaagaaacgataatatctgtcatattgtttaatgcgtcggctcttacagctgcagagttaaagacaaaacccgtgacatacttaacaatagacaagattatatatacaattaaactcaaataagcaccgcgttgcgccaatttaagattttcattatgagacatgcgttgaaccaccttgaattagtatagtaacaatattatgaatgatttattttaaatttacaacgtttttaatttttataaatttttataaaattaaactaatttattcattcgcaacccctaaaaatattttttagcctttcttcaaatttatttgttagaaaggcttatgcattagtagcgaagctatctaatgcgttcctttattttatgcgaatattatgagctagaaaggcgcccaactcttcctgtttgttaactttcgtctcgaaagtttctatgttgggaccctatgcatgagtagcgaagctgtctaatgcgttcctttattttctgcgaattttatgagctagaaaggcttatgcatttgacgttttacgtccaactgcgttcctccgtcttcttcaaatttatttgttaaaaaggcgcccaactcttcctacttgttaactttcgtctcgaaagtttctatgttgggatcctatgcattagtagcgaagctgtctaatgcgttcctttattttctgcgaattttatgagctagaaaggcttatgcatttgacgttttacgtccaactgcgttccttcgtcttcttcaaatttatttgttagaaaggtacccaactcttcctgcttgttaactttcgtctcgaaagtttctatgttgggaccctatgcattagttgcgaagctatctaatgtcgtgacctaattatatagaagaaaaagtgcctcagtgacaaatcaaatgtgatttctactctaccaaactctcttcgaaagacaattttctcctctatttattagcaaactattgcatttatccatatagtacttccttacttaaaatacgctgaatgttctgaattaaacgcttttttacatagttaacactagttaatctattagttaacattagttaataattagttaatttccatttgtattctcatgtgataaattctaaaagcatacaataaatttaatatgtaaaaagaaagggaatacacatgaaaaataaatatatctcgaagttgctagttggggcagcaacaattactttagctacaatgatttcaaatggggaagcaaaagcgagtgaaaacacgcaacaaacttcaactaagcaccaaacaactcaaaacaactacgtaacagatcaacaaaaagctttttatcaagtattacatctaaaaggtatcacagaagaacaacgtaaccaatacatcaaaacattacgcgaacacccagaacgtgcacaagaagtattctctgaatcacttaaagacagcaagaacccagaccgacgtgttgcacaacaaaacgctttttacaatgttcttaaaaatgataacttaactgaacaagaaaaaaataattacattgcacaaattaaagaaaaccctgatagaagccaacaagtttgggtagaatcagtacaatcttctaaagctaaagaacgtcaaaatattgaaaatgcggataaagcaattaaagatttccaagataacaaagcaccacacgataaatcagcagcatatgaagctaactcaaaattacctaaagatttacgcgataaaaataaccgctttgtagaaaaagtttcaattgaaaaagcaatcgttcgtcatgatgagcgtgtgaaatcagcaaatgatgcaatctcaaaattaaatgaaaaagattcaattgaaaacagacgtttagcacaacgtgaagttaacaaagcacctatggatataaaagagcatttacagaaacaattagacgcattagtagctcaaaaagatgctgaaaagaaagtggcgccaaaagttgaggctcctcaaattcaatcaccacaaattgaaaaacctaaagcagaatcaccaaaagttgaagttcctcaaattcaatcaccaaaagttgaggttcctcaatctaaattactaggttactaccaatcattaaaagattcatttaactatggttacaagtatttaacagatacttataaaagctataaagaaaaatatgatacagcaaagtactactataataaatattaccaatataaaggtttaattgaccaaacagttttaacaacaatcggtagtggttatggttcatacattaaaccacttgaaataaaagaaaatagtggatttgcacaaaaatcatatgcacaagtaagaaactatgtaactgagtcaatcaacactggtaaagtgttatacgcattttaccaaaagccagaattagtaaaagcagctataaaagctcaagaaacagcatcatctatcaaaaatacaataactaaactattttcattctggaaataatcaatcaaaaatatcttctctagttttacatcattttttaaataattttcgtaataaaccgtgattaaaaagaaccgctgattctcaatcgaatctgcggttctttttcattttccatcaattaaatgtttcttcgctatttgtcagcccacttttttacctgcaacttgttaaataatccttacatcgttaacgaatagttcatcatttagttgaatcatctcaactttattaacttcaaattttcacaatctattgcacaatccattcctcttccacttcaagcaccttaattaaacaacaattcaatagaataagacttgcaaaacatagttatgtagctatataaacgcctgcgaccaataaatcttttaaacataacataatgcaaaaacatcatttaacaatactaaaaatgtctcttcaatacatgttgatagtaattaacttttaacgaatagttaattcgaaaacgcttacaaatagattattatatatatgaacttaaaattaaatagaaagaaagtgatttctatgattaaaaataaaatattaacagcaactttagcagttggtttaatagcccctttagccaatccatttatagaaatttctaaagcagaaaataagatagaagatatcggccaaggtgcagaaatcatcaaaagaacacaagacattgctagcaaacgattagctataactcaaaacattcaatttgattttgtaaaagataaaaaatataacaaagatgccctagttgttaagatgcaaggcttcatcagctctagaacaacatattcagacttaaaaaaatatccatatattaaaagaatgatatggccatttcaatataatatcagtttgaaaacgaaagactctaatgttgatttaatcaattatcttcctaaaaataaaattgattcagcagatgttagtcagaaattaggctataatatcggcggaaacttccaatcagcgccatcaatcggaggcagtggctcattcaactactctaaaacaattagttataatcaaaagaactatgttactgaagtagaaagtcagaactctaaaggtgttaaatggggagtgaaagcaaattcattcgttacaccgaatggtcaagtatctgcatatgatcaatacttatttgcacaagacccaactggtccagcagcaagagactatttcgtcccagataatcaactacctcctttaattcaaagtggctttaatccatcatttattacaacattgtcacacgaaagaggtaaaggtgataaaagcgagtttgaaatcacttacggcagaaacatggatgctacatatgcatatgtgacaagacatcgtttagccgttgatagaaaacatgatgcttttaaaaaccgaaacgttacagttaaatatgaagtgaactggaaaacacatgaagtaaaaattaaaagcatcacacctaagtaaacagttcaatcattttataaaatcctgggacacttcatacttgtctcaggattttttaacatattgaacgagcctcataacattaaattattttatcttacattaaatttaataataacaactgatttttataagaacaaagtatcgcaccatagtagatacacaaataatacaaatgaagcaatttaacttgaaaacttaaataaatattctcaagttaataaataattaacttttagatggattcatcaaaaatcgtaaaaaagaacaatttgtattttacaaacattaattaaaaataaaagcaagacattcgtgcaatcggttaccttaaattgtttacaactgtcaacaataccaaggttttattaactatatttctcacaaaattagcttttagcattccaaacaaaaaaggttaaattgaacggaattatggcatttttaacttaattgtaaaaaaagttgataatggtcaattgttaatgaacagttaattataataacgttcaaaatatattattatttaattaagttaaataaaattatagaaagaaagtgaaacttatgcttaaaaataaaatattagctacaactttatctgtgagcttacttgcccctcttgccaatccgttattagaaaatgctaaagctgccaacgatactgaagacatcggtaaaggaagcgatatagaaattatcaaaaggacagaagataaaacaagtaataaatggggcgtgactcaaaatattcaatttgattttgtgaaggataagaaatataacaaagatgctttgatattaaagatgcaaggattcattagctctagaacaacatattacaactataaaaaaactaatcatgttaaagctatgcgatggccattccaatataacattggtttgaaaacaaatgataaatatgtttctttaattaattatttacctaaaaataaaattgaatctacaaacgtgagtcagacattaggatacaatatcggtggtaatttccaatcagccccatcactcggtggtaatggatcatttaactattctaaatcgattagctatacacaacaaaattatgtaagtgaagtagaacaacaaaactcaaaaagtgttttatggggcgtcaaagcgaattcattcgccactgaatcaggtcaaaaatcagcatttgatagcgatttatttgtaggctacaaacctcatagtaaagatcctagagattatttcgttccagacagtgagttaccacctcttgtacaaagtggatttaacccttcatttatcgccacagtatctcatgaaaaaggttcaagcgatacaagcgaatttgaaattacttacggaagaaacatggatgtcactcatgccattaaaagatcaacgcattatggcaacagttatttagacggacatagagtccataatgcatttgtaaatagaaactatactgtgaaatacgaggtcaattggaagactcatgaaatcaaggtgaaaggacagaattgatatgaaaatgaataaattagtcaaatcatccgttgctacatctatggcattattattactttctggtactgctaatgctgaaggcaaaatcacaccagtcagcgtaaaaaaagtcgatgacaaagttactttatacaaaacaacagccacagcagattctgataaatttaaaatttcacagattttaacattcaatttcatcaaagataaaagttatgataaagatactttagtacttaaagctactgggaatattaactcaggctttgtgaaacctaatcctaatgactatgacttttcaaaattatattggggagctaaatacaatgtatctataagctcacaatctaatgattcagtaaacgtcgttgattatgcaccaaaaaatcaaaatgaagagtttcaagttcaaaatactttaggctatacatttggtggtgacattagtatctctaatggtttatctggtggacttaatggaaatacagctttttctgaaacaattaattataaacaagaaagttacagaacaacattaagtcgcaacacaaattataaaaatgttggctggggagttgaagcacataaaattatgaataatggttggggaccttatggacgagatagcttccacccaacatatggtaatgaactcttcttagctggcagacaaagcagtgcatacgctggccaaaacttcatagcgcaacaccaaatgccattattatctagaagtaacttcaatccagaatttttaagcgtactatcacacagacaagatggcgctaaaaaatctaaaattacagtaacttatcaacgtgaaatggatttataccaaattcgttggaatggcttctactgggcaggcgcaaattataaaaactttaaaactagaacatttaaatcaacatatgaaattgattgggaaaatcacaaagtgaaattgttagatacaaaagaaactgaaaacaataaataactagtaaaacacggtcgccaacagtaattgtgacgaccgtgttttgatttattatcttagtaagactgccattctttttctcaatgtgagatataaaggaatagctacaattaaagtgaatattacgcctggaatcgcgtttaataacactacccacacaggtaaatttaaaataatagataatagtagcctagataccaaactgcctaatacacttgctaaaactaatgatagtacatttattttcaataaataaacaacagcaatagctataactctaaatataatcgaaataatcacattaattggattaaatacgccaaatatcagcaataatacgcttgataaaagcccacctaaaaagtactttttaattccaaagaaagctaatattaataatgctgccggtgcagataattgaaaatctaatcctggtataatggatggtattttcaaaactgccaaaatggttaaaatcgcagcaatgacactaatttgagtaatatcttttgatgtcatactaaaacccctataccgtttcataaacaacttgcttcggtgtgctttctaaaaatgatatgtaatgatttaaatcaattcgatcgtccacaaatattattctgcctccatatctcgtattaactggtttaatatcaaataatcgatggtaaccaattttcccagaggcaaaataacctgtcgtatacgttaagtcatcggacacacaaagttctcctttgacatacggatgcgcattgatacaactagcaattgctaaggcatcagtcactctttcattaagatcacctttattatttatatcttcaaacgaaaaatgtgttgccctaatccccctttgtccaaatgaatctaaacgtttaccagatatagcagatagaataatagctcctgtataaaccgtttcatttttaatatatgtcatcccttgatttagcgcttgttcagttacaccacattcttgtgttaaatgttggagatttgctttatcatcctcaataatttttaatgcttttatttgttgaatcggttccataattttttgtatttttatattgagaaaatccggttgcccattttcatgaaaaaaacctttattataaaacctttgtaccgtctgttctattttgtcaaactcacaaatcgtttcagcaccactaatatgaacatcttgattgctagaacgcatttttatactatacatgacgatcacctcaatcttcttgatgcaaaatttcaaacaacctatctacatcttgttcagtatgaaaatacgacaatgatattcttaacattggcttagtcacagttggataccttaaataacttgtaaacacatgatgctttaataatgtttgatgaatgttctcagccgcttctatgtcatcaaactcaataaacttaatcggcgagtttgaactattataattaacattgagtgcttttaacttttggttaaaatatttactcaaactatttaatttagtgcgtctatcatcagcatttattaacttttcaatatttctttttataaaatacaaattataaattggcaaactacttgagtagatgagtggtctaccgtgattaattaacatatccttaacatcatttgaacttaaaatcacacccccgtatgcaccacatgctttagataaactagaagtgagtatatctatgccttgataattcgagtaattctctattccaaaactatgtgaaacatcgagtatcagtgttgcgttatatttatgctttaatgagactaattgaccaatatccacaacgtcgccattcgttgaaaatacactatcagatatgattattttttgtttattttgattaggatattccgctaaccttttttctaaatcagcaatatctaaatgcttatatatcactgtttctaaaccgcttaacttaataccgtcaataatactcgcatgattttcttgatctgaaaacacgacacaatttgtatttttgaaaatattaaataacgccaaattagcatcataaccactatttaagatagtacatgcactatatccgagccaacctgctaactttgtttcaatttcttcataagctgtcgaacttccactaattaatcttgaacttgataagtgataactatacttccgcataaatctttcgaaatcatccttatcaaacgctatttgtcctaatcctaaataatcattagatgtataattcgtacatcgcttattttctacttcaatatactgtctatctatataccctaccgatttaagcgaccgatataaccctttctgttgtaataaatcaatttgctcttgaaacatcattcttgttttccttattttcacaagtgtcataatcaatttcaaagcccaaatcattaatcatatcgtagtctaattggttcggttgcccaccagtaattagataatcaccgacaaatatggaattcgccgcttttaatgctaatggctgtaacgaacgtaagttgacctctcttcctccagcaatacgaatttctttcgtaggattgattaatcggaataatgctacgattcttaaacatttcattggtgttaaatcatccatacttccaaactttgtccctttgattggatgcaaaaaattaatcggaatactgtcggcatccatttctttcaaagcaaatgccatatccacaatatcttgattagattctcccataccacaaatcacgccagaacatggtgatatattattcgctttcattagttctatcgtatctgttctatctttataactatgcgttgtcacgacgttatcatggtaattttcacttgtattaatattgtggttatatctgtctacaccagctgacttaagtttcttggcttgttcgtcattcgttaatcctaaacatgcacatatttttagttgcgggtgttgagatttaatcgttcttacagtgttactaatatgatcaacttctttatcgctcggtcctctaccactcataacaatacaatatgttccaatatgattatcatgtgccacctttgctccatcgataatttgttcctctggaattaaagcatatcgctgtttttgtttaatatctcgtgattgtccacagtacccacaattctcaggacatataccacttttagcatttaaaatcatgtttaattttacttttttaccgaaataatgttttcttaaaatatacgcctcatttaacaaatctaaggtatcaatattagtatcctcataaattttcaatacagtctcttttgttaattgttccccttgtaatatgcgtttagccaaattcatattaacacttcctatctaaaatgttatgtactgcctttttaaaaatacgtaccatcgttttcacttctttatttgacatacttaacactggcacaaacgtaatgacattttctaaatttctaatcattagcccgttttctttacaattacgtacaatacgttcaactttttcaatttctaacggcgttttactatctttatctgtaactaattcaactccaaacattaagcctcgacctcttacatcaccaacatttcgatgacgcttcagcgcatgtaactgtttctcaagtgttgatgatgtcgtttcaatatgtgacaataacttacgtttttcataaagtcttatattttctaatgcaaccgtacaaacaatttgatttccggtgtatgtatgaccatggaaaaaggtattcacaccgtgcgaatcacttagaaacgcatcgtaaattttttgagacgtcaacgttgctgcaagtggtaagtagccacctgtgatcgccttacctaaacacataatatccggttgaacatcttcatgattacatgcaaaaatctttccagttctcccaaaaccaactgctacctcatcacaaattaataagacatcgtattttttgcacaatttatcgacttctttcaaaaagcctttaggatgaacaaacaagcctgtcgcaccttgaatcaacggttccaatataaaccctgcgatttcatcatttctttcaattagaatttgctctatattcgttaaaatagctgtcatcattccattttcagtatcgtaattactgcgatagaaagatgggctttctacttgaatattctcaaatattaagtctttaaatattttatgaaaggtcttgataccaccaacacttaccgcaccaatcgtatcgccatgatagccgtgatttagcgttataaacttgtttttcttggcatatttttctctatcaatatttttccaatactgatatgccatctttattgcgatttcaacagacgcactgcctgtatcagaataaaatacttttcttagattacttggcgtgatttcgattaatttttccgcaagttctattgacggaatatttgatgatcctagcagcgtagaatgggcaattttattgagttgctttttaattaccttattcaagtacttattattatgaccatgcacattgacccacaacgatgcataaccatctaaatatttattgccattcgtatcgtaaaggtaactaccctttcctttttcaatgatgattgcttcttctttgctatatacacccatttgtgtaaatggatgccaaacatattctgagtctttttgtttaagttgttgtgtgtaattcatttttaactcctattaattgttttaaaaatgcttctgagaaattttcatacgtggcatattcttcaaatgtatagactgttttatttgttaattttccaatcgtcatttgattgtctttttcaatataactgtctgtatagcgattcatgattaaaaaattactcgccgatacattctgattaacataatcttggtgaacaatggcatcgctaatagcacctaattttgaaggcaacacactgatgacacaatctgcacaatcattgattagatctttagtcatgtagaaatcatctgtaccttcatatattggtgcggcaattcccccagcaccctcaattaagataaaatcaaattccttatctaaaacttttaccttatctaatacacgctgcttatttagaaaaatttgatctgccattttaaatgcaaggtgtggtgatacaggttgcttaaaagtataaagtgacgttatgtcatagcttaaatcacattcatttttaaatacttctaaatctggaaacgtcccgtcttggcgttcctcagtttgaaatggtttaaaaacacaaacacgatgaccacgtcttttcaaagcatggtataaatgctttgtaacataggttttgcctacatcagtattcgtacttgtaataaaaatcctcataaaaaataagcacctcaatccaaatgtaaacttttataattaataagtttacatttaaggcgcatgtttttcaagaaaacatgaatttaaacttctcagtataactataaattttggcaaaattttgaccttgctattgaaatgactaaggcttcttacggaattcgggcagatataaacagcgattcgataaaatatgtcagttgaaattaataattgcattatttcttaataaaaagacatcctagctttaccatgttgtgaaacaatccattaattgtaatattacgttgagcgccttgttcatcaatgctataattagttacataataaattgaacatctaaatacaccaaatcccctcactattgcagtagtgaggggatttatttaggtgttggttatttgtcaccttttttatttccacattctgtttccatattaaactattatttataatttccagcctgctgacttactttttattgttataaagtcttgatacatccctggtttttgaattaattcatcatgacttcctctttgtattatttcaccatcacagagtacgataatttgatctgcatttttaatagtttctagtttgtgtgcaattgtaataaccgttttgcctttactcaattcatcaattgcatgttgaatgagatgttcgttttcaggatcaatacttgctgttgcttcgtctaaaataataattggtgcatctttcaaaattgcccgggcgatagaaattctctgtctttctccaccagataaattactacctttttcatttagcattgtttgatatccctcaggtaatgacatgatgaagtcgtggcaacatgcttgcttcgctgcacgaataatttcttctttcgttgcacctggattgccaaacaatatgttattttcaatcgtatcattaaataaatacaccttttgaaatactgcactaattttcgacattaacgtacttaatgtcatatctttaatatcaacaccatcgatgcgaatatttccatcatcgatatcataaaagcgcaagagtaagtgacataatgtagatttcccacttcctgaaggtccaattattgctgttgatgtttgtgtaggtatctcaaaattcacattctttatcacttgtttatcatcatatgaaaaattcacgttttgaaaagcgatattttcatttttaatcgtcaaattttttccattctcatccagttctggagcattttttatcttttcaatatcatctatcgtcatatctatcatttcaagtacgtgtgcagcactattaatattttcaacactatcaaatatcacaaatgaaaaaattgaaatcataataagggtaggtaaatcaatactatgattcatatataataagcatgcaactaatacaatcattattgaaacaacttttaaactaagtaaatgcaataaattgaatgggatatattgcatttctatttttgtatttatacgtttactttcattgactgcttggttaaaacttttaagactcgtattttctttcgcgaatgattttattacttgaataccacgaataacctccaataccttttccactaattggttttgtacattatgatacgctggcgcattttgtcgactctttctttctaataattgaatcgcaaaaaatgatagtaatacgccaatgcatgctaataatgatacttgccacgaaactacaagtagagacaatatgagtactgtaattaatatgtatccattaacaacaacgtccaccattttcatagcaaagttttctaaaaaggttaaatctgttgttactattgttgttaactcatttgaatgatgcgaattaaaataacctaaccttacatttttcaatttatcccctatatctaaacgttctttcgcactcatttcataagcgatgctctcatggcttttgcttttgaaatatgctgtaataaatcgtccaatcactaataaaaccatgataattacaacattcaatatatctttcatataaataggtttatgagatagcacattattaaatatttttgcagctaaaaagataggtaacgcaataaaaatagcatttaaaaatgacatgctaaatcctaaaatcattcttgctttatatggtcttatccagtttaaaattttaaatgtaatttgaaacatatttgacctccttttctcattagtttaattatgtccagtattgattccccaatcttttgtatgcatgtgcgtatcccacattttcttataattaccgtttaattttagcaataagtgatgtgaccctttttctaaaatttgttgtttacctaaaacaataatttgatctgcatgttgaatcgtagataaccgatgtgcaataacaatcaatgttttatcctgcgtcaacacatttaatgcttcttgaattttttgttcgttgtctggatcaacgtaagcagtcgcttcatctaatacaatgataggcgcatcttttaatatcattcttgcaatagtgactcgttgtttttcaccaccagacaatttatctcccactgtaccaacattcgtatcatatccatctggcaacttttcaataaattcatgacattgtgctaacttggcagctttttcaactgcctcatccgtagcttctggattgccaagtttaatattttctttaaaagtaagatttaataaaaagttatcttgtccaacaaaaccaactaaatcgttaagttgtttcgattcaatatcttttatatttataccgccaatcgtaatttcacctgaagtcacatcccagtatcgtgatataagcttggcaatggttgacttaccgctaccagatgccccgacgatagctgtgaaattattttttggtactgtaaatgataaatgcttaaagaccagatcgtccttatctttgttatatgaaaatccaacattattaaaagcaatttcataatgttgaggcttcttaaattttgttgacaatactaactcttctagacttaatatttgattcacttcagttaatgcgtattgtatagactttaaatgatttacataattagtaaaattcttaatcggtgctactacacctaaagataatacgatgcataggaaaaattccgcatagtttaattggttgatagatatcaaatacatgccgaccggtaaaatccctaaaaatgttgaaggtaatacacttgaacctaaattcatatatccccatgtatttttaaaccaattcaaagtgtgaatcttataattatctactgcatctttatattttttatatgaactttgagattgattaaatgttttaatcacttcaatgccttcgataaactctacaatcgcgctattcatataattattcgatttcatttgttcagcatatgtctcattaaatccagacataacttttttaaaagcgaaaattgaaattggtatcgttactaataaggcactagccatacgccaatcaatgagcattatgtataaaaagatagcagctgacaaaagtaagtttcctataacttcaggaatcatatgtgctaaaggtaattctattgtttcaaccttatcgacaaatatattttttaattcacctattttcttagattccactacgcctaaagggagacgcattaatttttgagctaattttttacgaatttcagataaaatttcatatgccgtaatatgtgatagcatcgttgacgctccaaaacaacacacttgtgaaatataagcgattaaagcaataaagatataaaccataatcgaattaatcgtatatgcattgttaatcatcattaaaataattttaaagactgcccaatatggaactaatccagaaaagacactgatgatagacaacaaaattgataacataattttccatttactatcagaagcaaatccgctgagtatctttatccaatttgtctgattgttcatcgtatatgtaactcctttcaattaataatctaaattaagccgcttatattatttatttcactggatgatatacataatataaatttgttatttgttaaaaatcaatacttattacaagtacatcatatattagttgataacgattatcaatgtcgcgtggatttgtgacacatttcttttaaaaattcacaaggttatggggcagaaatgataaagagccactaatgatttattgtgtaatgattctttatccttagccacagctaatatgtacttaaaaataggaatacatgagtaaaactctatgttggggctccgccaacttgcacattattgtaagctgactttccgccagctactgtgttggggccccgccaacttgcattgtctgtagaaactgtggatccaatttctctatgttgggtccctgagtatagccttgtagagtctagtacattgatttgtatcccaatgtccctataattgattattcgctttatctaatgatcctatgactcaactattaaatcatttttcgaaatacttaattctaatacaattaaattcatttattgtaatattgcaaaaatacattgcacaccttgttcatcaatgctataattagttacataataaattgaacatctaaatacaccaaatcccctcactactgccatagtgaggggatttatttaggtgttggttatttgtcaccttttttattgttgcgcgttcgtaaccaatgtgcaaaaaacgcaacaagacagccgcttaaagctgaagtcatgatgtcaattaataaattgaacatctaaatacacctcctctctgcgttaaagtaacgcccgagatgttaggcgaccattatattatatcatttatttattatatttcgcgcaatattaaagttcgagtaaagcgttttttagtggtttacgctaatttaattgctatcttttaaaatccatttagataatataaatgtgatgggtatcgtaattattaaaccagcaaatggtgcaatttctgctggcaaatttagccaggatacaaatacatataataaaactgtttgtaagcttacgttgacaatctgcgtaattggaaaactaatgaattttctccaagtaggttttaccttgtaaacaaaataacaattcaaataatacgaaatcacaaaagcgactataaatccggtaatatgactaatcatatattcaatgtgtaataattttaacagcaataaatagacaacataatagtttaacgtattaatgccgccaacaatgataaattttaaaatttcagcatgcgtttgtgttagtttcatatgtgtaactcctcaacatcaaaatatatgtataactgcgttctccaacatactcgaatatgcgagccaatccgcttctcttcaaatatacttatttcagtttttataccctttcacagcaaatttagtctctttcccctcatccttatacgccattataatgtaactgatttatcgtgcgactcattagcactatagagattactttagttcaatagtaattttatatacaataagagcgacaacagtaatgagaggatgtctactatgcaattacaaaaaattgtcatcgctcctgactcatttaaggaaagtatgaccgcacagcaagttggcaatattataaaacaggcatttactaatgtttatgggaatacccttcattatgatatcattccgatggctgatggtggtgaaggtaccacagatgctttaatgcatgcaacaggtgctactaagtatacagtcatcgttaatgaccctttaatgcgacctattgaagcatgttatgcacgcgcagacgaacaacaaattgcaattattgaaatggcagcagcgtcaggtttggatttattagaaaaagaggaacgtaatcctttatacacatcatcatatggtaccggtgaactaattaaagatgcattaaatcatggtgctaagaccattattttagggattggtggcagtgcaacaaatgatggtggtacaggtatgctaagtgcactaggcgtaaagtttactgatgtaaacggggacttattacaaatgaatggtgctaatcttgctcacattgcacaaatcgatataaccaatctagattcgcgattaaaagaagtgacttttaaagtggcctgcgatgtttcaaatcctttattgggtgaaaatggtgttacctatatttatggtcctcaaaaaggcgctgatgcaaagatgataccaaagttggatttcgcaatgtcgcattatcatgataagataaaaatgtgcacaggaaagtccgttaatcaaataccaggttctggtgcagctggcggtatgggcgcagcattattagcgttttgtgagacaactttaacaaaaggtattgatgtcgtctttgacattacagattttcatcaaagaattaaagatgcagacctcgttattactggagaaggacgcatggattatcagaccatctttggtaaaacacccgtaggcgttgcgttagctgcaaaacaatatcatattcctgtcatcgcgatttgtggcagtctaggcgaaaattatcaacatgtttacgatttcggtattgatagtgcctattctataatctcttcacctagcactttagaagatgtcctacaaaatagcgaacaaaatttattaaacactgcaactgacattgctcgtattctgaaattacaataatgtcaaagtaaatcatcagctttattatttgcagttaaaacttgaatgaggtgaaacccatgaaaagaactgataaataccgtgattcatatcaatacgacaatcaaaaccaaaatcatcgtcgtcaatctgaagacgcatcgtatagacaacaatatgctaaaggcgatcctgaagagcacccggaacgatactataacggtagagattatcgaagagaacaaattcttgaagaagaaaacgagaaatcacgccgttcaaaaaaatggttatatatcattattgctattctcttaattattgtcgctatttttgtcacacgcgccttacttaacaatgatagcgataaagttagtaatgaccctaaagtctctcaaaattataaaaaacaagttgaaaatcaagacggccaaattaatcagcaagtcgataatgctaaagaaaatattaaaaacaaccaaaaaactgatgacattattaaaaatttacaaaatcaaatcgacaacttgaagcagcaagaacaaaacaaagctgattctaagctaactcaattttatcaagaccaaatcaacaaattgacagaggcaaataatgcacttaaaaacaatgcaagccaaggtaaaattgaaagcatgttaaatgatattaatacaaaattcgacagtattaaatcaaaattagaaagtctatttaaagatgacaatggtggtggcaattaattatttcacctttcaataagtatataaattaattaagtcctatactttatctgtatcactaagttattcgtgatgatgcattaagagtatagggattttttttataaacttgtattctaactacatacaaatacacacaaaacgtatataatttatataattatatcatttaaaggagtctgatcatgcaatcttcgaaaaccaaaacgaagcatttttcatttttattgctaattacgttaggcgtcatgaccgcttttggcccactaactatagatatgtacgtaccatcattacctaaagtgcaaggtgattttggttctactacatcagaaattcaattaacattatcattcacaatgattggtcttgcactaggccaatttatctttggacctttatccgatgcttttggtcgcaaacggattgctgtatccattttaatcattttcattttggtatcaggtttgtctatgtttgttgatcaattgccattattcttaactttacgatttattcaaggtttgacaggtggtggcgtcatcgttattgccaaagcctctgctggtgataaatttactggcaacgcactcgctaaatttttagcatctttaatggtagttaatggcatcatcactattcttgcaccattagccggtggattagctttatccgtagcaacatggcgttctattttcacaattttaactattgtggcactcatcattttaattggcgtcgcttctcaattacctaaaacatctaaagatgaattaaagcaggtgaattttagtagcgtcattaaagactttggaagtcttttgaaaaaaccagcatttattattccaatgttattacaaggtttaacttatgtaatgctatttagttattcatctgcatcgccatttattactcaaaaattatataatatgacaccccaacaatttagtatcatgtttgctgttaacggtgtaggtttaatcattgtcagtcaagtcgttgctttattagtagaaaaattacatcgccacttattattaatcattttaactattatacaagtggtaggtgttgctttaattatcctgacacttacattccatttaccactttgggtcttactcatcgcattcttcttaaatgtgtgtcctgtgacgtcaattggaccgcttggtttcacaatggctatggaagaacgaacaggtggcagtggtaacgcatcaagtttacttggcttattccaatttatcttaggtggcgctgttgcaccattagttggcttaaaaggcgaatttaatacatcaccatatatgattattatcttcattacagccattctattagtcagtctacaaatcatttactttaaaatgattaaaaagcaacatgtcgcataacacttcaacataattagaaccctagcaaagatatctatctttgtcggggttcttctttatgaattatgagatccaatcttcaactaaaattacgccttcatatcaagtacatttctattcaatcaccctttaacaggcatccaaatttctgtaatatatttttcacttgtagtatcaccatcctgatacaactcaaaaaatggtgctgattttaccgtatctgcttgatattgatgtatgtagtgatgaacctcttccattttttgttgaactgctttaggtactgagccctgtgcttcaaataccatatactttgaacttgctaatgttatgacatcatatttttcaatatcagcactattatctccggtaactgcaatcatatatgacatcttaccgtctaattcgggtatacataagccaagtatcccggctaaatcaccattattttttaactgtaaatccgcaattactccctcttgataacatctttgccaaaaccctgctatatgttgctgagcctgtcgtccattttcatacgtttctttaatacctactaacgttaacgacgcaagttgttgtaattgatattccatttaatcactccattaattttattcactcatgtaaaacatatgtttaggacattttgcattgacgctatataattatattaaatatttattgaatcaatgcgaggactatattatgaaccgaaaaatattaccagttaaacctatcagtcagctatttcctatccctatggtcatggggtgtgaaggtgtttccgcagccatgatgttgcaatacaataaccaacatatccctgctacagaaattacgaggcattggccgacacatccgaacaatccacataaaggttatgttggacatcacttattcattaagcttggcaattatcatcaaacaatatttccagaagcatatgtaccatttttacaaaaatacaatcctaatatcgtagacggcactggtaaatccttagaagatcttaaaggtattatcgatcaaggtcaacctgtgttaatataccatactaatcttggttctaaaccattactacgtgttttccgctttgataacaagccagcgaaacaagtttcaaatattcacgtaacgttactcattgggtacgatgattactattactattatatcgatccactttggagtcatattcgtcgtggcctagttttacctgccatcattccaaatcgcaaacaaattattaaaattcgtaaagagaaaatggaatacagctttaattcaccaggaagaaagtgcatttatgtgcaaccacattcatatacaattgaaaatcaacaacaaaataaacacacgtaagtaaacacattactcgcgtgtgtaaaacataaaatgcgcaaactgggtcaggtttgcgcattttaaatttctattatttgtatcgtctcatttatttcctggtaaatatcttctgaacgccattgtcttggatagcctagacacggacagagataacatctgccatcatccatcacacttttccgaaaatgaacatggcccataatactatatggtatatcgaacatcgcatacaaaggattgaaatcacttgtcccaataaatgcattataaaaatcgaatatacgatgcggcataggaacaatgaaatcagggtacgtcacaacatgtgtgactaaaatcactcgtctatttcctacttctaatatatctttcttcacttgttcagccgctattttagataaattttgatctgatatgccccaagatattcgttctttatcttgccaagtcgcaccataatgttttcctctttgtaactcatctaatgaaaatcgttgtgctgcaaagctataatcataccaacctgtatgtcctattattgcccattcttcatttactataaatggttttcctaccaagcactgtgacatactcttataattattccaaatgtcttgcgtagtcatactttcaacttcccataaatcatggtttccaggaacaaatttcacaggtatatctaattgttttgtcaattgcgttataaattggtgcgtcaattgataatgatttgagatatctcccgcaatcaacaatatatccaaatttttatacttaactatttcaaccaatgcctctaagtaatctttggatgtttttttattatgacgatcaaaatgtaaatcggcgattgtccctatcttcatacccataccttctttactcaaattaaaatgttatttattatgccatagcttatctaatatatatagttaactgcttcatttagatgattattttatatttttgcataaaaacttatatcttttcaaaaaatcgataagttttagttatcatacccttgcctatcaaatgttttttcttatatttaaaaaaataattgctttattaaatggatttctttagtatttataattaagaaaacgcttacacacaacttttttattttctttatcctgaggaggaaaattatggcaagaaaattgcatagagagttgaataacagacacatccaattgatagcaattgggggcgcaattggaactgggttattcctaggatcaggtcaaacaatatctttaactggtccatcactgttattcacatacatgattattggggttgtactattcgcttttatgcgcgcattaggcgaattgttgttgagcaatacaagatttaattcatttgttgatattgcaaatgaatatttaggcccttttggtggctttgtcattggctggacttactggttatgttggattgtatcaagtatgtcagacctaactgcgatgggacaatactttgcattttggtatccacaagtcccaaattggattaccgtgctatttattgttttaatcttgattagcttcaacttattaggtgccagattatttggtgaactggagttttggttctcgattattaaagttgtcacaattattgcgatggttatcgttggtcttgtattaatctttttctcatttaaaacacattatgggcatgcatcattcacaaacttaatcagtcacggcggcatgttccctggaggaacatttggtttcttaatgtcattccaaattgctgtatattcattcattggtattgaacttataggtgtaactgctggtgaaacgaaagatcctgaaaaaaccttaccgaaagcaattaataatgtacctatccgtattttattattctatatcggtggtctattagtaattatgtcagtcataccttggaatgatatcgatccaaatagtagccctttcgttaaactctttacattaatcggcgtgccatttgcagcaggtgtcgttaactttgtcgtgctaactgccgcggcctctgctacaaatagtggaatctattcgaatagtcgtatcttattcggactgtcacaacaagggttaggtcctaaagttttaaataaaacgaatagtcatggcgtgccttatttatcaatgttagtttcatcaattgcattacttatagcagccttgttaaattatatttttcctaatgcaattcaactattcatatacgttacaacgttatcaactgtgttgtttttagttgtttgggcaatgattattgtcgcttatctaatgtatttgaaaaagcatcctgaggcacacaaaaacagtaaatttaagttgattggtggtaagcctattgcttacattattctagcgttcttcttctttgtattcattttattattctttagtgacgaaacaagagcagctatttatatttcgccattctggtttatatttttatttttcttttataaaaaatacaaaacgaatgctgaaaagctcgcgtatgaacaacgacaaaatgacagcggtcatttcagatatgacaatcaataatttaaacatctcgctctagtatcagttcaaccgatactagagtttttttgaaaataacttcattttatcaatatatctatgtcattatgccttaaaagtgataaaatattaactattaaaattttgaggagtattgtatggcactattagaagcatttttaatttttatttttgctgtgattattagttcggttatcaataatcgattcccacaaattcctactgcctttattcaaattgcattaggtgtcgttattttcattattccaatacaagttgatttccaattcaattctgaagtatttatgtttgccgttatcgcgccactactttttgtggaaggtacccacgtctctcgaacaaaattattagaatatcgtaaacctatactattaatgtcaatggcactagtgtttgcaactgtagtcggtgttggctattttatacattggatttggcctgccttaccaatgccagccgcttttgcaatagcagcaattttatgtcctactgatgcagtagcagtatctgctattacacgtgggaaattattacctaaaggttctatgacgattttagaaggtgaatctttactcaatgatgcagcaggtatcatttcatttaaaattgctgttactgcattagtaactggtaccttttcattattccaagctgttgaacaatttatcatttcaacaatactaggtgtacttattggtgcaattattggattcgttgtcgttagaatacgtatagacttaaccgctaataaaggtttaaaagataacaataccttaacttttattcaattattaacaccttttgtcgtatactttttagcagaagaagttcatgcttcaggtatcattgcagttgtaatcgcaggtctaatccatggtttagaacgcgaccgtttaattagagcacaaacggaactacaaatgaattaccatcaaatttggaacacatttagttatgccttaaatggttttgtatttgttgtattaggttttatgattcctactgtagtcatagatattttccaaacagagccggacaacttttcatttttaatattgatcgctatattaatcgctattgcaatttatgcatgtcgatttgtttgggtttatttctggtacaaagatttttatttcccgaaaaatatacaatcttatctagacgaggaacatgattcacatgaaacaccaccttctcgtgtgcgttacgcatttattatgaccatgtgtggtattcacggtacaatttcactttcaatggcacttacattaccatttatcattacaaaaggacaagcattcgaataccgtaatgatttattgtttattgcatctttcatggtattaattagtttaatcttagcgcaaattgttttacctttaattacaccatctgccgaagatactacttttaaaggtatgacttatcaatctgccaaaattttcattgtccaaaaagttatcgaacattttaaaaacgaaagtaaaaaagacaaaaacgatacaaattatcgaccagtattaacccaatactatggagaattgttatttttattaaattcagaacctgataatcaaaatacaaaagaactcaaacgtttagaagatattgcaaaagtaatcgaaacatctacacttgagcgtttaattgataaaggtaaggcaacatatcaggatataaataattaccgcaatattgtcgaattaacagagacacaccgtactgcatcatttgttgaaaaatttgcaaacttcttcaagatgttatggcttagacttaaagcgataaagcactacaaagccttaaacaaagaatctaaaaagcaagaatttgaaaattcattcaaagatgttcaaaaaattatgcgtattgtgaatcacaatattattttacgcttaaaagaagaacaaaatagtacaaatgtacttgaggttagcttagtcattaatcattactatgatatgagtcgctcattaaagtggcgtgcacaacgtcgaaaagaacgtcaagaaaatagcaatcaaatcataccgcaagctatgttccacaaccacaaattggaagcattgtacttacaacgtcatcttttagatgaattaattcgcaaaaataaaatcaacaatatcgttgcagctcaaattcgagaaaatatcaattacaacgaaattgtcttgtctttacagtccaaacattaagcaagacataacaacaccccccgtacatatgagacaaagtcatgatcatctcatatgtacggggtttttatagtcaacatcaaaaaatcggattgatgaaaagtaaataacctttcatcaatccgatttgattatagaatctattttttaagtttaaatggaattgtacatacgttaacattcttttgataaattaaatacaatttcatacgcaaactagtttgattgtgtaataaattatgccaacgtttcttagtaataaattctggtatcactactgtaatcatatagttttgatcgttggctttacgattaatcttatcgataaaacgtgaaattggtcgtataatactgcgatattccgagtgtaaaataactaatcttacatctgggaaatgacgtttccatttctcttggaatgctttctcatcttcatctccaaatgatacatgtaccgcaatgacatcattattcgcaagcatttgtgcgtaataaatagacttatcaactgctgttgtaatactagttatcggcacaattgctaaattacgatctaccacgtccacattaagaacatcaatgtcagaacgtaattgttctgcgatatctcgataatgtttgttaattttcaagaagaaaatcaccacgaacggcaagaaaataagtatcggccatacttggctaaatttagttatgagtaaaatcataaaaacaataaatgtcacgataccaccaagtaagttcacagacaacttacttaaccaattcttaggacgttcatgaatccatttaataaccataccgaattgtgctagtgtaaatggaataaatacaccaacagcatacaatggaattaaatcttcagtcataccatcaaatacaataattaaaataatggctaatacacctaaaataataatcgagttagagtagcctaagcgatcacctctaacagtaaacattctaggcatatatttatctttagacattgaagccgctaacatcggaaaagctgtaaatccagtgttggctgctaataccaaaatcatcacggtcgttgcctgtacaaaatagaaggcagcattatcaccaaatatttgcatagctaattgtgataaaactgtcgtttccgtttgtggcataattccataaacatatgctaaaccaacgataccaactaataaaaacgctaaaattgaacccatagcaattaacgtttttacagcattattagcacttggttctctaaaattggttaccgcatttgaaatagcttcaacacctgttaatgatgaagcccctgatgaaaatgcttttaatagcaagaataatgttactccaggaaccgcagttcctactgatgcatgcatatgtggttgaatatctcctgtcgccacacggaaagtacctataaatattaatatgactaaccctataatgaaaagatatactggataggataatacggtggcagattcagttaaaccacgtaaatttaatattaaaataaaaagtaccagtaaacatgcaatcagtactttatgcccatataaacttgggaatgcagcaacaaatgcatcagcaccagatgatatactaacagcaacagtcagtatgtaatcgactaataatgagcctcctgcaagcaatccccatttttctcctaaattggtcttggacaccatatacgcgccgccacctttaggatatgcataaataatttgcctataagacataattaaagcagctaataagatcagaacagcacctgcaatcggtaaagtataccaagttgcaactgcacccactactgataatgtaatcagtatttgttcgggaccgtaagccactgaagataatgcatccgacgaaagaatcgctaaccctttaaacttcgatatcttttcgtcttttagttctctgttttttttaggttgccctataataagtcttttaaattgattaaacataatctcctattcctttttatactttttgatggatatcactatacgcctatctttccaaaaagtatagagagttaattaatattttttatgtaattatacacctattaacatataaggtgtcaaaaataatggtaaatatacctctttaattaatttattcaatagaactggtataataaaataaatctcattaggcacttaagtaaatttaacatataaaaaggaacgtttatgactactaaaaaactgtattttctatccatttctattatcattttagtcgccatttcaattgctatatatataacatttaatagcaatacgaagacacggttaaccaatgattcgcaacaacaaatagatacaattatcgagcatgatttacaaaagggacatattcctggagcatcaattttaatagtaaaaaatggcaaagtttttttaaataaaggttatggttatcaagatgttgataaaaaagtcaaagcttctcccacaacaaagtatgaaattgcttctaatacgaaagctttcacaggtcttgcaattttaaaattagctcaagaaggtcgattaaacttaaatgatgccgtatccaaacatgtgcctcattttaaaatgaactataatggtcaaaatgaaactattacgattaagcaacttttggctcaaacaagtggtatacctagtgatattacaagcgaagactccgtaacaaataaaaataatcgtttaaatgatgtaacccgtgcaattatgggtgatgaattacatcataagcccggagaagaatttgaatactcaaatatgaactatgatttattaggtttaattatccaaaacgttacgaagcaatcctatacaaaatatattacaaattcatggctcaagcctttgcatatgacacatacatcattcaaacaaactaataataaatcaaaacatgatgctattggctacgaattacaaggttcgacacctgtcgtctctaaacctgaatttaacctttgggatacaccatcagcatatatgatgacatcaactgaagatttggaacattggataaaattccaacttaatccacctgataaatacaaatcattagttcaacaatcacataaaaatttatcatcaacaattggtgaacctaatgccaatgcatatgcttccggctggtttaccaataatgatgaacatttagtgtttcattcagggacgctcgataacttttcatcatttattttactaaatccaaaacaaaattatggaattgttgtgcttgcaaatttaaattcggaatatgtacccaaattagttgagcatcttaacacacaaattgtaaatcacaagcgatattcgacagttgcgtctatgctcaatcaatataaagatcaatttaatattgttaccgttttgatgacaacacttattttattagcatttatattctcagcttatcgtgcttggcaaatgcgtcacgggaaaatcatcctgcgcaaatcaaaacttaccacatttttaagttggctaactttatgtttatgtatcgctatagcactcatattatatgcattaccatatctcattctcggtagcaataactggtcttttgtactaacttggctgccaatagaaattaaattaacgttaactacaacatttattgcattattcagtatgttaattacaattctgttagtactacatacaacgacaattaagaaaccataaaaaagacttgttcaatcgcccatcaatccgcaacatacatatttatgtatgaggattagcgatttgaacaagtcttcattattaacatgctatatgcagaaaccgattatttaattggattcatgccatctttccaagttttataaatcagagtaccaccttgtgctttaaacttctcattgcttacgccacgttcaaatggttgcgcaggttgaatatcaatatttggttcaacaccaagttgttctttataccattctgcaaattcagaacctttaacaggtgcatcatctgctacattataaataccattttcaaaatgaatagcttgaatagatgtttcaactgcatcatcaagatgcacaaatgatgttacaccatctgaaagtgtcacttgaccatccataaattgattataaatcatgccatcttttccgtaccaagtacctgggccatataaccaaccaaaacgtaaaacaacgtattcatccatacgagccgtttcttcttctagaccaaccacaccatcaaccgttacttttctatcaccagttgagttaaaatcaagtgaagtttcctcatttgctaatccttcgccaggttcatacataaaggcaatactttgggcaattactttcttaacgtcatgctttttcgccgcatcaattaagtttttagaaccttcaatacgtactttcgtatttgctgccatatcaacattttttaaatccgtaatttggttgataatgatttctggtttaaaatctgccaacgcttgatcaatagtatcagcttttaatatatcaccaatatatgcttttacattaacagcagctagcttttgttgaccattctcagatgtagtaaaaccagcaacctcatgcccctcttcttttagtctttgaactaatttaatgccaataaggcccgttgcaccagttacaaaaattttactcattataaacaccttttctctatttgtctttttgatataattacttgcttgatgagtgtacaaaattcacatgagacttccaaatgatttgcctcaaaatttttcaaagtgtcgtcgtaaaaactgtctaacaaatgctagtagtatgtcgtagacctatgacaaatctgaattatgacgaagatcaatcaagaaaaacagcaccaagatcatttcaatttgaaagtaccttactgctgttctttatttattacatttcaattttaataatgaccgtaattatcacgtgattgtcatttccttgcaatcatacctaaaaacactaattaatcctgtgcatgtcgctgactttctttagtatgaattaaatcagtaataaagcgattgactggcgcttcaatatgacgttgtttacctaatgttgcaactgcaccattaatataatcaatttcagtttttctattattaacaactaaatcttgatacatggatggataatgcgcaccaactttttcatttaaatcaactaaatattcaaatacttcatcaacatttaaatgaacattatcaatcgtcgctacatgcactatttcttgcgttaatttataaatcaaacacttcgcataactactttcattcagtgatgccatattacactccaacactgtgcttaatgcatttgccgtaccattaacacaaatctttttccaaatcgattgatataaatctttactaatgacaccattcaattccgcttcgttaagtaaatcagcaacttttataacattttctttaccttcatcaactagttcacctatttcaactggtccactaccaagtaaatgactgtgtccagggctttcaagacctgccgtccaagtcgtaacacctctgacaatttgtgattgagcaacatactgcgcaatgacttcttcatgcttcaaaccattcatcgtacatacgacaatcgtttcattatcaatatgtggcttcatagcttccatcacttcttttaattgcatagactttggaaatagaaagacaacatcgtaaatgctttcgtccggttgatcattaaaatgatacatcggaatgtttaactcgaatgcctctccattaatcgttatatttaatccatgttgcttaaccgcttcaacatgagatgtatatccgtcaataagtgtgacatcatatcccgcttgaaatattttggcaccaaagccactacctagtgcacccgatccagcaattgcaattttcatcctataaacccctcttcatcgttgttgttcatttttaaaatactactttcgcatattagcgtcaatttgaaaatcattcgcttaatatacacacagcttttatcgtctataaaagaacacacctaacattaaacgtcaatacgcaacattaagtgtgtatgatatacatactttcacaaaatttcctttaaaatccctacataataacttgctttcatttcagttttacaaattcgtttgatttttaggaactaatagtaaaatgactaaaaatgcaacaattgctagcaaggcattaaacatcatacctgtgaaaccacctaagttcaaatttaaattagctgctaacacagtataaaccgtaccagatactgctactccaaatgcatttcctaatgatgacgccattttatatacgcctgaagcaacacccgacttatcatctggcgcactagcaactgctgtatcagttgatggtgtagcatataatcctaaaccagtaccaaataataaatatccaactatactagatacgatataccacatttctggtaaaaatgttaacgacaataagattaacccaatcactgtaaagccacttcctagtaatagcgggcgtttcggaccatgttgagataaaatcttttcacctacacgaatcattgataacactgctattaaatacgttaatgaaatataacccgtttgcgaagaattaaatcctaattgttgttgataatacgtgttaatgacgataagtgcaccacctgctacaccatttaataagaagtttgaaatagttgcaccactgtaccctctatttttaaaaattgaaaaatcaacaagtggatgctttattttattttcgtaatatacaaaaccaactaatgaacagataaacactacaattaaacctagaattaacggtgaaactaaaccaaaattagacgtctgtgtgatgattacatttaaacttaacattgtcactactaaaatgactaacccgataacgtcaaactttttagcttctgctttcatacctttgattggttctgccttagtctcaggtgcatgtttgattaagtacattgctaataatgttaatagaattgaaacaacaaatattgaacgccaacctatatatgtagccattaagccaccaaacaacgtacaaataccactaccaccccaagaaccaatagaccaatagcttaaggcacgttgtcttcttgtaccaatataatattcgttaataatagcaagtgtggatggcataatacatgctgcagacaaaccttgaattattctacctataattaaaaatgctggcaaaggtgtaataatgatgagtaatgaacctacaacatttaatatcaatcctacataagtaattttgacgcgaccaaatttatcagcaacatcaccagcacctacgataaacaaaccagcaaataaggcagataagctaacagcgatatttatcgttccaacgtcactactatatgttgattgtaatgggacaacaagattaacaagtgactgcgcgaatagccaaaaggtaataacccctaaaacgatacccaaaagcaatcggttgtcacctctaaattgttttgatgtgtccatgaattagataagcctcctatgtttaagaaaaacaaatttttaatatgatatattaagaaacaatatcataaatttgcagaaaattataaataaaacatctcattttttagtatttttacaataattaacgctttttatccaaaaactttcgtgataataattgctattttagtgtaaacgcatacaaatacaacctataaaacggctactcaaagattatttgagctccttgagtagcctcatttttataaaccatgaaacggaatcgctaaattataaacatcttctacgattacatattaatactttgcggccgatgattagattgattttttcgatgtcgtgtcgttgggtctaatcgtttttctaaaaatctcaataggacatcaatgacgattgcaatgatagcaatcggaatcgcacctgctaaaataaacgttgtgccatccgtcgcatttgtaccacgaatcacaatgtcaccaagcgtaggtgctcctataaatgatccaacggcaacaacacctatcgcaacaaccaaagcaatacgaatgccaccgataataaccgaaacagataacggtaattcaatcattcgtagcacttgattgcgtgtcattcccatacctttgccagcatccttaatattcgcatcaacactagctataccagtataagtattttttataattggaagtaacgcatataaaaacactgttaaaactactgtttctgagcctaagcccatgactaacattaaaatagctaacattgcaatgactggaactgtttgaattatatttgcaattgtaattacaaatccagaaagttttgtgtatcttgcaagcaagatccccaatggaataccaattaaagctgcaaaaagtacaccatagacagacattaataagtgtttgaaaaataaatcccatagatagccaaagttcgtaacataataattgaataattgctgtaataaattaccttccattacttatgaccacctttctgtttatcaaaatagtggtgttttttcaaaaattcttctgcgacgacagcaggttctttacctttaccatccgcttcataattcaagcgctgcatctctgaagttgaaatctttccagtcaacttattaatcgtcgttttaagttctgggtgttggcgtaataattcatttgttgcaacagcactcgcagcataaggtgggaaaaattgtttatcatctttaagtactttcaaatcatacgcggcaattcgaccatctgtagaataacctaatgcaacgtctaacttctctgagtttaatgcgtcgtagactagacctatttgcattggtctcactgtaccaaagtcgaaaccatactcttttttaaacccttcatagccatcgcctttacgattcatccatgaactatccatacctaaacgtaaatctttactatgctttgctaaatctgaaactgtctctaaatgatattttttagcagtttccttcgttaccatgaatgcatacgtattcgcaaaaccatacgaatcaaaaaacgtttgatcaaatttctttttaaatccttgttgtgtggctatcattgctttcttaggatctttgattggtgcttcctttaaaactcccgttaaatctgtgccattatatctaacacctgatatattagcatccccattaattaaggcattatgttgaatcgtacttgaccctaaattatttactaatgttggctttatcttgccatgtgtatcatgctctattaacaaccgtaacatatgtgaaataatttgcgattcgcttgttgataatgctgtaattttgacatcatttttcgtgctcttactacctagtccgggcaaactacatccagataacacagtaagcgataagacaagcacgacaagtatatatttaattttcttcattatcttagcctcctaattatccagatacttttaagcctttgggaactacccatttttcaactaaagctaataaggcatcaacacctaatgctagtgcagtaacgagtaccgttgcagttacaatcatcagtggatcatataaatttaaaccattgaaaatgaaatcacctaatccacccgcacctacataacttgcaagtgtagcccaactaattacatacacagatgacaaacgaatgccaccaatgataagcggtaaggctaatggcaattccacatctttcatcaattgaaattgcgtcattcccatactttttccagcttctttaatgttgctatcaatattttgaacaccgagtaccgtgttatttaaaataggtaataatacataaataaatagcgctacaattgcaggcgttttaccaacaccaaaaatcggtatcataatagcaagtacagctagtgttggaatagtttgtaacacacctgccacagttaatataatattggcagttcgctttgtttttgataataaaatgcctataggtactgcaacaatgatggcaagtaataatgccactatagaaatatagaaatgttccagtgttttcgacatcaactgtccaccatgttcatgtaggaactcgatcatgatttatcatctcctatgtcacgtactttgacattagtagtgtgttgctcatgcacttttgaggacgcagtgtcttcccccacatgttccgtttgcactgcatcctcactatcgccccaaatcgtgtcatatacaatatcaacaacattggcacgcgtaatcagtcctactaaacgttgcttatcatctacgacaggtacattcctaacgtttctttttaaaatcgtacgtacagaatcttgtaacttagaatcaatttgaacggtataaatatgttgttgcatggtatctcgtaaacttttgtgtccacgtataccctgatttatatcttcaatgtctaagaaacctagtaaatggttattactatctactacaaaaatagtatcaacacgtttttgtctcataatatgaacggcgtcattcagtgttgcttctgcttgtatcgtgattggtttaatcattacaccttctacagtcttgtcattgggacggtcttgaatcagtctattttgtcctataaaatcacgtacaaaatcatttgcgggatgtcttaaaatattgtctggtgtatcaaattgcaccaccttcccttctgacataatacaaattttgtctgctaatttaatcgcttcatccatatcatgtgttacaaagataaacgtcttgcctaattttcgttgtaacgttttaactaaatcttgtaacgtatctctcgtaataggatccaatgcaccaaaaggttcatccattaaaataatatcttgttcggccgcaagtgctcttacgacaccgatacgttgttgttgcccacctgatagttctgctggataacgctctaaaaatgactccggtaaatccacaagtttaattaattcctttgcacgtttatccttttcttctttagtccatttcaacaatttgggtaccaacacaatattctctttaatcgtcatatgaggcattaagccaatttgttgaataacatagccaatatttctacgtaattcgacaggattcatactccgaacgtctttaccatcaatttcaatttgtccttctgtcgcttcaatcatacggtttatcattcttaaagcagtcgttttgccacttccactggttccaataaatgcgataaattccccagattgaatatctaaagagatgtcatctactgcctttttattaccagaataaattttcgttaaatgcttaatacttaacataatcatttctccttcctcataaaaaatatgacgaatgatacgcataaaataaaaagaccatcatcgcaattgttaaacaaatagagtcataagttaaacaagtacacatcatggtcttgattatgtagaattttatatttttcatctgtaatgtgaatacttaacagtaaacggcgctatgtatgttgaatttctaccgattactttgtttgcacattcgtatattcgacatttaaaactaacatactctatatgatgttattaaacattattattttatcttttgcaactaaatagataactaatatttttcaaaagcgaatttattatcgctcaattggttgttttatagcaaaaaagtgtcgaaaatgtgaaatattatcgcaaaagtcgaatttttgtaataatgcacacgcatccattgttacaggcggacaaacgcccatccgccacccacaaagtcatccttatattttaatatcttcatcattcattgtagacacccttgccttttgctaacagttcctactcccaagcctgtaacggaattccaccgtcaaagtgttgcccatgacaggcacacctaaaaaacaaccaacagcatgagccattggttgtttcgtgtcatcttgtatgttgttgtataaccggtatgcttttactcattaattacttatcatgcatccctttaccttctagtatttggttaatatacttttcaacacgcttttgtcttgtttcactgcgtttagcttgtccaatatgatatatatattgatgttgtctgcctggcgttaatttataaaatgacgactctagctgtggcatttcttcgaacttagcttctaactctttaggaataacatattcctctgttttcttcatttcaacttttttaccagctttttcagctttaattgcttcagctagataatatttaatttcttcggtacgtgcttgaatctctgttaaattttcaaatcgtaactgacgagctgcttgcaccttttcagtctgttgaatgagtgtatgatatttatcctccaaaatggcacctttatgaaataatagtgcaacataatttttgaagccatggataagtactacatttttattattcagcgtgtaacaaggatgcatccatttatacgcttcctctaattctgtttcattaaagattaacgctctcaaatatttatattcttcttgccattgactctctttatttaaaaatgcctcaacttgttcattcggttgtttctcactcatagtcatcacttccattttatttttcaatacacattgtattatatatcctaattttataaaaaactaattttacaaatgcttttgtattcttacaaaaaatgcatttgactattattataataagcgtataattgtcgcatattattttttgtatttttggcaataacgaaggagtatttatgaataaagacaagcaattgcacaacgacaaaatcaatctatcccaattagtcttattagggttaggttctttaataggatctggttggctatttggtgcgtgggaagcatcatcaatagctggaccagcagctatcatatcatgggttcttggattcctagtcattggaaccattgcctataactacattgaaatcggcacaatgtttcctcaatcaggtggcatgagtaactatgcccagtatacacatggctcattattaggctttattgctgcttgggcgaattgggtgtctttggtgacaataatacctatcgaagctgtgtcagctgttcaatatatgagttcttggccgtggcattgggcgaaaccaatgaaacatttaatggaaaatggctctattagcacatacggattgctagctgtatatctcatcattgttattttttcattattaaactattggtccgtaaaacttttaacatcatttacgagtttaatttctgtatttaaattaggcatacccatgttaaccatcatcatgttgatgttatcaggattcgacacttcaaattacggccattcggcaagcacatttatgccttacggaagtgcaccgatttttgctgcaacaacagcatcagggattattttttcattcaattcattccagacaattattaatatgggttcagaaattaaaaatcctgaaaaaaatatcgcaagaggcatcgctatctcactgtcaatcagtgcagtgttgtacatcattttacaaagtacgtttatcacttctatgcctcaatcaatgttacaacatagtggatggaatggcatcaacttcaattcaccatttgctgatttagctatcttattaggaattaattggctcgcaattttactatatattgaagcttttgtatcaccattcggtactggcgtgtcatttgtcgccgttacaggtcgagttttacgagcaatggagaaaaatggacatatccctaaatttcttgggaagatgaatgaaaaatatcatattccacgtgtagcaatcatctttaatgccatcattagtatgattatggttacgttatttagagattggggtacgctagcagcagttatttctactgcaactttagtagcctatttaactggcccaacgacagtgattgcattaagaaaaatgggaccaacaatgactcgtccatttagagcaaaaattttaaaagtaatggcaccattatcatttgtattagcttcattagctatatattgggcaatgtggccaacaacggctgaagttattttaatcattatacttggattaccaatctacttcttctatgaatatcgtatgaattggcgtaatacaaagaaacaaattggtggtagcttatggattattgtatatttaatcgtgttatcaatactgtcatttataggaagcaaagaatttaaaggcttaaatatgattcactatccatttgactttatcgttattattattgtggcacttatcttctattacatcggtacaacgagttcatttgaaagcgtctatttccgtcgcgcaacacgaatcaatacaaagatgcgcgagtcactaaataatgaatcaaagtcatctcattaaataatttaaaatgcagtgccatatatgatttcaacacacacattaaccaaccattgatttcaacatcttggttggttttttattttgaaaatgggttataaataactaacataacaagatggcgagagtgatattgtaatgaaatgtcactgtagaagaacatcatataatgctgaaaatggtttgagttaaaacagatatcaagctcgtctgattcagtcacaaatttgtcttgttatacttgtcacctatcatctatagaccgtggtatgattaaattggggatgataaaggaggttaataaatatgaagattaatactacaggtggtcaaattcatggtattacacaagatggtttagatatcttcttaggcattccttatgcagaaccaccagttcatgacaatcgctttaaacattctacgttaaaaacacaatggtcagagccaattgatgcaactgaaatacaacccatcccaccgcaaccagacaacaaattagaagattttttctcctcacaatctacaacttttactgaacatgaagactgtttatatttaaatatttggaaacaacataatgatcagacgaagaaacctgtcatcatttatttttatggtggtagttttgaaaatggtcatggcacagccgaactctatcaaccggcacatttagtacaaaataacgacattatcgttattacatgcaattatcgtttaggtgcattaggatatttagactggtcatattttaataaagattttcattccaataatggactttcagatcaaatcaatgtcataaaatgggtgcatcaatttattgaatccttcggtggcgacgctaataacattactttaatgggtcagtctgcaggcagtatgagcattttgactttacttaaaatacctgacattgagccatacttccataaagtcgttctgctaagtggcgcactacgattagacacccttgagagtgcacgcaataaagcacaacatttccaaaaattgatgctcgattatttagatacaggtgatgttacatcattatcgacagatgatattcttatgctgatggagaagctaaaacaatctcgaggaccttctaaagggcttgatttaatatatgcgcctattaaaacagattatatacaaaataattatccaacaacgaaaccaatttttgcatgttatacaaaagatgaaggcgatatttatattactagtgaacagaaaaaattatcgccgcaacgctttatcgacattatggaattaaatgatattcctttaaaatacgaagatgttcagacggcgaagcaacaatctttagcgattacacattgttatttcaaacagccgatgaagcaatttttacaacaactcaatatacaagattcaaacgcaaaactatggcttgctgaatttgcatggcatgatacttctagcgcacactatcgcagtgcttaccatattctagatatggtattttggttcggaaacttacaaatattagcagcacatcaatatccaacaactgctcaccttaaatttttaagtcgacaaatgcaaaatgatttagctaattttgctaaaagcggtaaaatgccttggccgatgtatcataatgaacgtcgctattatcgcacatatcaataacgttatcgcatctaaaaaagcacacctgaatttgatagcaggcgtgcttttcatatgagaattatgatgatttaaatgttttagcataatgattatttttcaatgtgaaaacaacgattaatcctaatgcgccaatgatggcactcgtatacgtgatagcttgaacagaaacatgtgtcatgaccaagcctccaataatgcctccaacaccaataccagcgtttaaactagacatgttccagctcattacttggcttgtgtcgccttcaacatgttgaatcacaccgctttgcactgctggattagtactccattgcatgatattccaaataaatagtcctgctaacaatagacctgaaccaggtaagattaaattcataagtaacatcatgacgataaaaatagaaacagaaatcattaaccaacgcttacttgtaattttatcggagaatataccacctaatgatgttccaataacgccagcgattccatttactagaagtgctaatgaaacgaatgacatatcatgaccattagataaaataagtggatttataaagacgaatgtcactgagtttgcaatcaatactaaaaacgtaataattaaatattttgctacttcagcaggtcttaatattttcgaagtaacatgattttcatgagatggtgcctcatgattcacagggcctcgttgtatttcctgatccttcggtaaatagatcatcattaagaagccaacaataatactcacaataattaagaatagaaatgtatagcgccaacctactaaatcgccgataaccgttccaattggtacaccaaaaacattggcaccactaaaccctgtatatacaagtccaatcattttgccacgatttttaggtgctgataacatcgctgtaatagctaatacttttacgataattagtgctgctgctgcagatgagataattctaccaactactaatattgaaaaatttggcgctacagcaataatgccattaccaatgataaatataagtaatgtccataataatacaggccttgatgaaaaacggttcgttaatttaacaagaataggtccacatatcgcaaatgttaaagcgtacattgtcactaattgaccaacgacagcttctgatacatgtaagtcctgactcatcaagttcataattcctgcaaccatcatttcaaccattcctacgataaaaatacttaaaatgaatgtaaatagtcgcatgattgacattttaaaactcctttcaacaaaatttccgatattcatttcccttagaataacgatttattaaaaaatgtgtgcaacacaattttatatataaccgttctattatataatattttgctttaattttctgtgcttaattggaaaattattgaaattgtttttcagtatttgaaaaattaacacaagtatgtcatttaataattatgtataattacttcagtttcaacaatgactccaaaaaagcacgcacgctttatatgtcagaacagataactgactacaaagtatgcgtgcctttatgaatattttcgctgagctaaataatagcattactatatgtgcgcgtcacttcttttccaattaaaactaatgcctaaatctgatgcggtaaaatctatcatgactcactcttaacatccgtatttcgtgctactaattgatgtcttgcattgaaaaattgaccatagcttaaatatgtcgcaatcaaagcagacataatggtcgcagttgtatgaataaacacgactaacaattgaaatttaatcgcttgtaaaggtggtacgccaccaataattaagcctgtcatcataccaggaatcgacacaagcccatatgttttaaccgaatcaattgttggcactatagctaaacgaatactttcacgtattgcacctttagaagccaatttaggtgtagctgcaagtgataatttagattcaatattagtaccatcttgtacgaatgcacgatctaaattttggtaagctaaattaattgcaatcaagccattattagcaagcatgccgccgatagggataacttcattggctgtaaattggatggcccctgtcgcaatggtacctgcaagcggtaatgccgttccaacaaagatagccacaaaggaaatcaaaaagacatggtgcatgacaggtgatgatcgactaatcgtattccatgatgcgttgacaataatgacaaatacacataatactaatagccatttgtcattaattttaaaaatatagtgcagtaagaatcctaaaatgattaattgtacgaccgcacgtagtgtcgccacaatcaaatctttaataatatgtagaccttctttataagaaataataattggaataactaatagcaatgccgtcagtcctaatgctgtattactcatgttggttcaactcctctgtattagaaatttgaccatcaacaatggttatacgcttttgaaagtgtcgcatactttggtcatcgctgtgggtaatccacataattgccacgccttgatctgctaatttaaaaatgatattttctattttttctttattattaatatctaacgcacttgttgattcatctaatagaaggatgtctggggtatacattaattggcgtgcaatcgcgatcctttgacgctcgccacctgacatatgttctattttagaacttaattgatagtgtcctaaacctacatctttaattaattgcttagcacgtttcttatcaaatttatcattacgcgcaagagacggaaaaatcatattatcttcaatcgtttcaccaaacaaatcgctttgttgcatcaaatagctaatgtgtcggcgtaatatttctggttcgtaatcatcatatggtttacctttaaagtaaagtgttccactggttgggctaattaaattacatattaatttttgaaatgtacttttaccactacctgaaggaccaataattgcaatggtttcacctttatctacttttaaattaatatgatttagtatgactctatcacttgcgtcatatactaaatcttttatctctaacaacatatttacccctcctcgtatcatgagttatttcgatataatagggtattccttttcttgaatagtgtgctatacctataagtcgacctagtcaatgcttattaccccttaaaatcgctctaataagacatatcaaatatagtattcccatttttgaaaaatttagtgccatttcattccggaaaattttttaatatttatgtcaaaattgaagtacactgcagtgatttattctcactttttaaaaataaaaagcctttaacatgatatctcatgctaactaagcatctaacttagttcttgcatgacatcatattaaagactttctttattatttatggatttgactaccacatgatatttttataagtttcatcattcaatgaacggacaatttcagtaacaagacggatagaattttcataatcatccacattgagtaccgatacattagagtgcatgtatcgtaacgtgacacctattgtcatcgttggaatatcttcatttgcgacatgaatacttcccgcatctgtacctccacctggtgtcgtatcccattgtacttcgatgttatgtttcttagctacatctttaatatgcttgcgcaaaccttggtgcgcaatacttgtagcatccatcataataacaactggaccaccgcctagtttactatcgctcgtttgacctgacatacctggggtatcataagcaatacccacatcgacggctatcgccaaatctggtttaattgtattcgctgccactttcgcaccacgtaacccaacttcttcttgcactgtggcaccactgtataagttaatgccaatattttcatcttttaaacgttttaatacctcaacagctaatgcacagccatagcgattatcaaatgctttcgcagttaaatatttatcatttgcaagcacttcaaattcactatatggcgtaaccatattgcctacttcaacaccagcttcttcagcttcttccttgctactaacaccaatatctataaacatatttttgatttccatcggctttttacgttcttcaggcgttaagacatgcggcggtttagaaccgatgatacctctaatttctttgcccgaatctgttgtaatcgttactttttgagatagcatgacttgattccaccatccaccaactggcgtaaatgaaataaaaccatgtttatcaatctttgttaccataaaaccaacttcatccatatgaccagaaatcataattgagtattgaccattctcagcatttttctttccaaaaatgccacccaagttatcttcaataatttgatcactgacaggctctatatagttacgcattgcttctttaacttgcatttcataaccagcaatgccgtttacatctgttaaatgcttaagtaatttgactgactgattcatgtaattcaacctcctgtatttcaacttaaaactattgtatcactaactttcagaaaagcgttccctaccgctttatcgttttcaggcttaaatatttttaaaattttgtgagaaatacacttaaaaaacatcatatttctaaaatttaatatcccgaaaacgtcaccatttaaaatttcttattataataccttattcttttattgttattaatttcaatctgtttagtcttgcgctattaaaaaaataaaaagcgtagagataacaacgcattaacgccgcaatttcccctacacttaaatactagtttctttatttaacttatcattaaacttattcagatgttgaatatccattaatcataatgtgaccatgccgatagtatcaatacttctttatttcgatcatctacggtatagacgaccctgtgctgatggttaattcttcttgaatatcgctctaaatatttaggttctaatttttcaaaggattgtgttattttatacggatcattttttaaagtctcaacaatttctaaaaatgacttctttaaataagaatgttttattttctttaaatctgatttcgctgaatttttaatcttaaccgtgtaattgctcattacagattatcccaatcaatatcatctatatttgttgtaccactactatctttttctctttctcttactttgtccattgtaccagtagattcaagatatattgtcccttgtatacttttccaatcttctaaacctataatcacagcattattttcggcattattgccactaatataaattggttcgtgattattattaacattttttagtaattgataaaaatcttttctcgcttctgtagggctagtgataatcatataaaccctcctttgtcttctgatacgctaattatagcgtacgtatttaagtacgtcaatatcaccgacacatccgtcgtaatcttagtccctatatactatcgtacacaagcttttgttcttttcttccaacataccgtctataatgctcaaaaagaaatcagcagtggaacacactacgttctctaccgttttatcgttttcaggcttaaatatttttaaaaactttgtgagaaatccgcttcaaaaaacctcatatcttcaaaaaaattgacaaaatttaaatttttgaataacatcattttttagtaaatgttataatttctttataatacaaatatcgaaagaaggcgactgactttgaaaaaattatgttcattaattgtagtagcattagtttgtatcattgcattatcagcttgtggtaaagaacaaaccaaaacatatgaaggtgatgttagtggtaaacatgtactaacttctatcacatataaagatgataaagttttaaaacagtctacaatcaacacaattaaatatgacgatctaggtatggataaagacgaagccaaaaagttattcgccaaatctgaaagtattttcaaagaccttaaaggcgtaaaatacaaagtagactataaagataaaaaagcaattgaacacttagacatagattacacagaagttgacatgaaaaaattaaataaacgtcttggtgtttcaactaaagaaaataaagatattagttttgaaaaacttgaaaagcaattaaagcacagaggtttaaaagaaaaagataaaatggacgacaaatggtttataacataaaaatgccctcagataagactaaggttacaaaccttaattcatattctgagggctttaatatttgaaattcttgtgtgaccagcatccactactaatataaaattatttgcagtaacgctaaaatccgctgctttcattttcccgaaataaataagttaactaatgagttttaatttataatcatgtatcgtttgcaattcaccatcgactttttgatatacaatatgatcagcagtaatttctgtaggactggatacgccaacagcagctgcaatattgaataagccttcatgcaaacttgttacatagtttgtgacacgatattgcttttctccaacaatcaatgctttttcttttttcgcatctgtcgttgcaacacctacaggacatgtattcatatgacattgttgactcataatacaaccgacactaatcatcatgccacgtgcaatattaacaaaatctgcacctaaacctagtgcaatcgcaattttatctggtgtcactaacttaccagatgctgccaatttcactttatctcgaataccatatttttctaacatgccagacacaataggtagagctgtaaacagcggtaagccaacaccatcttgtaattcttggaatgttgcaccagtaccaccttcatcaccatcaatcgtaataaagcttggatacttatctagttccaccatcgtacgtacaagtgtttcaatttctgaaactttgcttactacaattttgaatcctactggtttttgacctaattgctgcaactgatcgacgaaacgaatcaaatcttcagcattatgaataaattcgtaacggttaggtgaattgattgttttataaggttcaacatttcggattttagcaatttcttcgtttaccttttccgcttccatatgaccaccacgagtcttagcaccttgtaccaacttcagctcaaatgcgcgtacgttagataactgtgcgacctctttaaataaatcttcactaaaattaccttctttatcacgaacaccaaacaaaccgggaccaatttggaaaatgatatccccattaccttttaaatgatattctgataagccaccttcacctgtattcatccaagtgcccgctttagctagacctttagataaagctgtaatggcattttttcctaaggctccataactcataccagattgtcctacgatacgttttaaaacaaatggatgttttaaatgttcacctaattttattgcatgatcatcacttaagtaatacggatcaatctttgtcggtacacgatattcttcacgactaaataaacgctcattcgcgattttataaatgaatgttgataacaatgttgtattatctactgaaatctcattacgttgcatcggaaacattgtgttctgtatgtaaaagccgtcttgataatctttagtagtaccgaagctggtcatacgagagttatattttccagccaaaacgatatttttataatcattacgtgaaaaaggttttccttcattatccccagaaaataaatactgacgtaattccggtcccattttttctgaaatatatctaatacgtgctagtaaaggataattccttaatacactatgttgtgattgtcttttatctttaattaaccaaataagcccgataacaataaccgtaagcatgaatcctacaacgataatgttaactataaattgcatgactgtaagaaacgtcattacaatacctcccccaaaatttcaattcaatatttatgatacaccttacaaaataaaacacaatggaagcgcttcattttataaaacaattttatgatatgtttttcattttaaattttaatgtataaaacatacaatacaaagtaatatgtgctaaagtatctatataatacaactatttaagaggtatactatgtcaaatacaaataaacattacatagaagaagaatacgctaccgaacaatcgcgttttttcaaacgtgatattggatttattttcctttatatatttttggttaacatcttgccaatcattatcgtctttttaacttttgggttagtagctgtattcactcaacaagccccatggggtttctcttttcctatttcaatgaacattagctatttactcgcagttattatttcactagctatttttcgtcggatgcatgaagatgcatttgttccaatgatacgttcgcaaatcgttgccagtgctaaatataaatggcatattcttatatcatttacattaagtatcgtactctttttacttttaaatcatttctatattttcgcactaaatgtagattcctttactgtctttgacatttacccgctcattagagaatatggttccatcagtttaatagctatattttcgttaaccattatattaaatactttgatttgtcaacttattttccgtcatattttaattcaagaattaagcagattaatacctttaaagattacaatagtattatccgttatccttgaaacactgtactattatccatacattaatacatggtgggaattcattccagcattgatactagctagtagtgcgacttacttatatttaaaatcaaaccgtaattttatggtgagctatttctatcaattagcagttatactcgttttgcatattttcatgtaaaatttttcagagtattatccattatccatacacatcaaaaagcacacttaaaagtcagtatcacaactcacttttaagcgtgctttatttagatatactgtcgttctaaaaacgagccatatagaatgtttcatgtcctagcatgaagcacatgaatcgccatgctcaatataccttttaaaatttaaatattcattaacttaatatgctttaattcacttcattaaagactatttgctgggcgtggtgttggttttttcaataaactcataatcattattacaatgactaacataccacaaattagatacatccatttaaatcctactaaatcggaaataggtcccatcaatgcgccacctaacgatatacctaagtctgcacaggcaataaataaacctaacaacatattacgacctacttttggtaagacgaaacttaagtatgatgttaatgttgggtacaccattgcttgtgtcattcctattaatattgcactgccatagaaaataattgcacctacttgcggaccaaatgccactacaaatgacgcgattactaataatgatagtacagataccatatatttaggatgccacataccatctgacggaatgtatttccttaagtaaaatcttgccgcaacaactgcgatggcctgtattgtcaaaaagattcccgcattcgcgaatcctaaactcactgtgtataacggtacaaatgtactaactgcaccaaatacaatcgatgcaacaatcatgataataccactattcaacaactctttatttttgaaaaattgcgcaaaaacagttatagcgttaaacggcattttttcaatcttatctgacgtatcgggttcctgttcagcaaaggtcacgcgatagccaaagaatgttgttgttaatgcgataaagataatgacaattgcaaatagtgaaatattatttgcattccaaatacctacggcaactaatggtccgattaagtttggaatcgttgaaaatagcgagtacaatgatacaccttcagaacgatgttcctctggtaatgcatcaataatacctaactgtaaagacatagaaaagaatgccgtacacacaccttgcataacacgtgctacgaaataaccttctaatccagtaaaaccataaataattaaagctatggcattgataatcaaaataattcttaatactttaatgggaccgacacgagcaataatttgtcctgcccatggtcgaaataccattgctgttaacatgtatgcccccataacgataccgataaccgtattcgttgcgcctaaatcatgccctcgtaaaggtataaacacgtttaagattgcattggcactaaagaacatcaatgttaatatatataatctcaaaaagggccaagccattgcacctttcattatctcactccttagaatgatagttgtttttctattaattctcttgtataagcattgtcacttttatgcaatgcgcttgtcggaatttgttcttctatttttccgtttttaaaaataattaattgatcacataaatacgtggcagcttgaatatcatgtgtgataaaaatataactcaactgacgcgtttcacgtaaatgaatcaataaatctaatatttgtgtttgaattgacatgtcgagtgaactaatggcttcatcaaacaaaatatatttagggttaatacatattgcgcgcgcaatcgcaacacgctgtgcctctccacctgataacatattaggatatttatccatgtatgccttagatagaccaacttcttccaacaatgtaattgcttggacttccataacatctttaggttgtccatcacattgacacatcacttcaaataagatttctctaacagtctgaaatgggtgtaatgatgacgtataatcttgaaataccgcaccaatttgatgacgtctcactttcttcttatgcatcggttgatcatttaaggttacacaacctttatctggtttctcaatacctaatatcatacgactcaacgtcgatttaccgctaccactttctccgataatcgcaatcgtcgcaccgattggacactcaaatgacacacctttcacgataggtgttcgacgacgcttaaaaacatgtgcgctttgatatgacttttcaacatctttaattttaatcatgtacatcacccctcatcacatgtttaaaatgatcattaatcttcttcttagtggataataaatacttcgtataaacatgttctggatgatgcaagactgattcacgcgtaccatgctcaatcagttgaccatttttcatcacaacaacacggtctgcaatcttgttaataaccgttaaatcatgtgaaatgaaaatcatcgcacagtcaaagtgttttttaatatctataaatgcttccagtacatcatattgtgtaattgtatctaaagccgttgtcggctcatcagcaatgattaactttggtttcaaagctaacgctaaagcaatcatcaatcgctgtaacattcctcctgataacatgtaagggtatgattttaatatacgtttaggatctttcaaacttaaataatccatatattcaatcaatgtcttttcaatttcttgtgtagacattgacgtatgtactttcatagtctcaaacatttgtttaccgacagtagttgatgggtcaaaggcacgactaccttgttgcatgaccatcgcaatatctttaccacggtattttttcaattgtgcttccgataacgacaacattggcttaccatcaaaggttatatcacctgttacgcgtaatcgttctggatttaaacctacaatcgatttgcatgtaattgatttaccgctaccactttctccaataacgcctaaagtttcacccttagttaatgtaaaattcacatcactcacgagtggttgatctgtccaggtatctgtaatcgtcaaatgcttaactgttaacaatgtcatgattgcaccactccttttttcacagaacgaagtttatctttagaagagatgcgaggatcaatagcaatttgtaaagcatcggataagaagttaaatgccatcactataatcactatggcaatacctggcgcaaacaccatttcaggatgtgtaaacatcacttttctagcttcgttaagcatcatgccccactctgcagtaggcgctttgacacctaatcctaaaaatgaaaagccagatatttgcaagatcattgaacacatcgaactactagagatgatagcaatatctgctaatgttaacggcataatatgtttgtgaataattttcatatcattcataccgattgttttagcaaatcttacatggtcagaagcagtgtactgcataacacttgtacgtataacacgacagaaccatgcccaacgcgtcaaaataaatgccatgataatattttcggcacccataccaaacaatgcaattaatgctaacgttacaacataacttgggaatgccaacataacatcacacgcacgcatgattaaggcgtcaacaaacccttggaaatatcctgataagaatcctaaaatagatccaataagtacagaaacaaatagcgcaacaaagacatataacaaacttggtctaatcgcataaattaacctagttaaaatatctctacctaaatggtcagtacctagtagatgttgaaaactcatgccagcaaatttgtttgctgtatcgatatggttaggatcataaaatgtcacaagtggtgctgctaatcctaaaaagacatataatacaataatgcctaaagcaatcactgcacctttatcttgtaataatcgttttaaaattatcatcgtgcgccctcccttaatcttggatttaatagcgcattaatgatatctgctaatgtattaaatacaataaataataccgctacaattaatacatatgcttgaatgactggaaaatcatgttcaagtattgcttttaaacttaattgacctagtccaggccatgcaaagatatactcgataacaactagtccacccattatcattggtatagacatacaaaagattgataccgcaacttgtaaagcattacgcaacacatgcaacattaatgtgatagatttcacaccgcttgctcttaaataaagtacataatcttcatttaattgttccaccatcgagcgtctaacatttctaaagtaaataccagcataggcaatcgtaataacgatcactggcaatatgtaactttctggacctgttaatccagaagtcggcaatatgtttaacttcactgaaacgtaaataataagtattgaagctatccaatatgatggtaatgcagttagaaagaaagccactgaacgtatcgcacgatcagtgaactttcctctttttaatgcactaactacacctaaaataattgatgtaatcatcaccataacacttgaaattattgttaatttcaatgtattcataaatgctggaccaatgcgttcagcaacaggatcacctgtaatgtagcttgtaccaaaattaaattgcatcgcttcaagtaaccaatttttatattgaattaataatggatcattgaaaccgtacttctcattcgtttctgcaatcaactctggtgttacatttggcgttccttgtgcatgtaaaattgtcacagctggattttcatttgtaatatacgtcaatagaaatgtcataaaacttactacaatcatcaatggaaacatgagcgcaatacgttttaagataaatttgaacatctaaacgctcctttatttatactgcatttcattgaatggtaattcgtactgtgattgtgtgaatgatactttttctaaatctttcggcgcaacaactgtcatactaccgtgtgaaatagggataaagataccttcatcatcaacttgtttcaaaatgtttttataagcgtctgaacgctctttaccgttttggattttaaatgcgtcatcaatgctgttgtatattttatctttattctcaatgcctgatgttgcactttcataaccatttttcgctttaaatgctgcaatagtactttgtggatcgtacaataatccccaagtttggttgaacattaagtcataatcaccagaagtacgacgttcagcaattttatctgatgtttcgccattgatgtttaacttaatacccattttcttaaattctgcttgtaagtattctgcttgttctttttgacttgaagaacctttgtcatagtacattgccatttcaaggtttttaccatctttttgacgaacatcgctgtctttacctttcttccaaccagcttcatctaataatgattctgcttttttaaggtcatacttacgtgttggcatatcgaaattaatgtctgttacatttttcgcaaataattgagttgctggtttttcttgaccatctaaaatttctttggcaattttatctctgtttaccatatgaccaatcgcttgtctgactgttttgtcactgacagcgttatcttttttaccagaattgacaactaacattttcgtattcataggttgactacgcttaacttgatagtcaccagtatctttcaattgttttaaagagtctttgtctaagctatctgtacctctatcatctgtgaaggcaaagttcgtttcaccttttttcattgataggaatgctgtttcaccagcaggcattacttttgcttgtactttgttaagtttagacttttcgccccagtattgatcatttttgttaaagtctgcagactcatcttttttgtgttcacctaatttaaatggaccagtaccatcgaactttttaacgccatcttttgttgtgccgtttttaaagtcttttggagacacaaatacatatggacgaggcatcgctaattcagccaatgcaggttgatatgcttctttcaaattcaattcaaccgtgtacttatctttaactttaacattgtcaattaatgttgaaatctttaaccaagaatgcaattttttgttttcttgaactgcgtcaatatttttcttaactgcgtcagcatcaaatggcgtaccatcatggaatttaacgtcatctctcaaatggaacgtgtatgtcttcccatcttcagacacttcccattttttagctagtaaaggcttaatcccatctttcgtgttacgtacaagcggctcgtatatcatactttcagcagacatcgatccaccgtaaacatgcgggttcatatccccgatatctttaaccgtcgtatacgttaattgcttgttttcttttttctcctctaaacctttattaccgccacaaccagttaaaattagccctgatgcaagtaacattgcactcattttagttagttttctcatttgcttttcctctttctaaattgataagttgcattacttaatcaaatcgtaatgattatttttctcaattatttgcttatttttatgtaaatgtcaaacataattcaataatttttttctattataaaacttcaaacccttattatgaaagcgttctattgatttccaaaaattttgtgacgagtgctttatcttcttcaaataaatttgtattaaattgagaagataagtgttgatcttgatgcatatccttgtacgcctggcaacttgcttcatagcgagctaggaactgatcaatcattggcgtttggatacctagcattttcccaatatgctgaatcatcgctgttctgtaataatcctcacttggcattcttggaatttgaacaacatcctgttcatttttatagacttgcttaaatggtacagctgaaaaatcaaagtaatgtccgttttcgtctggctgtgaaaatggatcaatgaggattgcggaatatcttacataaagcagatattcttgtaagatatctggcaagatttcgaaatgctcaatatcaccttcatccaaagtttcaggacgtactggataattttccttcaccataaattgaagcaggttgactgacggcactctaaatacttgtaaaatagccatcatttccttccacattaaacgcatttcacggattaatgtcatcgttatcggtccttcaggaaataacttatacacataaaccggtacatccgttccttcgaaaatggctttcaatgaaaagtcattcataaatagtggcgggtgcacataaagcgaactgttacgtgtttcagcatgcagtggcgattcaacgacttctaattgaatcttcaattgctcagctaaagcagagattcgttgacacattgttgagtttgaatgtgtcgatcccatgtacaatttcttttttacacctgttgtcaacacatgattaggtgcttctttatcaacaatacgtgtatcgccaagataagttgaaaatgaaatcacttcgatatcctgactgaacttagacataaattgttccacaatcatttgcgatccaaatgtcggtgaaattaaaatgacatgtttgacactttgcaaagtttctaacgacaattgctgtagtgtgtcataataagcatctgctgtgcatgccatgacaaccgtttcgtattcacccttaacgtttttaacgtctttatacaaacgattaatttcaaacttaccttccagatgttgatgcgcctcgttttgtattttgacttcaaattgtttctcttttttatacgcttgatataagcgttttgatttttctgatgttgaggcacgtccaaccatatcaatctcataatctgattttaaatagcaaatattcgctaattggattgcgaccggaccagtgcctatcattaataatttagacatccgtaatacctacctttatagctgcttttttataaagtgctatatcaaaaatttgctgtggtctcatatgtttattcacacattgccacttatcttccgctgtttcttgtgacggataattaaatattgctttgatgccatcaccaaagcgcattgcaactacgacattttcatttgttaaatcatataattcttctaaaatgctgtactttaaaggaattgtcgagctgaatatgatatgcgtcacatctttgatatctttaagttcagataccttttgatccgtaattgttatatcttcatttggtgctaagacgttaacgattctgcgtcctaggtcaacggcttgtggatcaatatcaataccgataactgaagcacctgtttcttttgctacttgaattaacgtcattggatatgcacctgaaccaactaacaataatttgtcattgctagctatactacattgtccaaactcttcatcaatacaatgttctatattgtcaaagtaacctgtggtagacgcctgtccgtctaatagacgtctagctctaatgacttccacttgtttaacacactgcgctgtaatatattgcagtgattttattaattgtgctttttcttcaacgtcacgccaagcattaaattgttgttcataaataggatttaaaataaattcactatagtcatccatcaatgtttctaatgcttcgatatattgattgtcttgtaatacacgctcgtaatgcgcttcaaacttttctaaatattgttgtaatatcaatttgatttcattattaaagttattcattgtaggctccttattctatatatgcttttcctgtagctacagttgtaacctgtcctttaattgaagtttgatatcccaattgatgacatcgctttgatgtcactaaaatactgccccctggctgatgtactgtaaaatctttgcatgcgtcattacgttgataattattaaaaaccccaattgatgctgtaccagaaccacagctattttcccaaattaaactttgtatttctggtatatagattaatggctgtaaaaattgacgttgttcatcaaaaagcatcatacctactgttttatatttgtgattccattgttgctcacgcacatatgtttcaaccaaatgttgaatttctattgttacttgattaactggaatcacataatgtacatatgtttcataaataatttctattgctttccatgaatgattacccatattaattgttgttggcacaacacgatgggcttgtggcatttgaacttcatagtattggcaatcatgaattgcgcattgcactaaatccgaacagccagataccttcaccttaaactgttggtctttaagcaaatgactttcctgcaaatgatgtatatatgacatcgtcgcattaccgcaaaattcattaccgctcataactaagtgaaaatcattgccatcatcattttgtgttgattctataaagcctacctgttcacaacatacatgtgttgcggccatcaactgattggcgatagatgcatattcactagcatcatgttttgaatgaacaagtatcgtcatattccccgaaggattatacttagaaaattctataacctgccgattcatacgacactcctttagatgtattttttagagcctctgtaattttaattactagaggctcttatgcagttgttgcgaagcaaacaactgtattcctctatacctgtaattttaattactagaggctcttatacagttgttgcgaagcaagcaactgtattcctctatacctgtaattttttagaagttgaacctaatagctctatctattaggtaagtcatgctaattcgcaaaagcgaaaagcatggctttatatgcagttgttgcgaagcaagcaactgtattcctctatacctgtaattttttagaagatgaacctaatagtttcccatctattaggtaagtcatgctaacccgcaaagtggaaagcatgacttagtaatcggttgttgcatcaacatgcaaccgtaaaccttatttaaagttgcttcttgtggctctacaagcgaatgcagttgtccgttaactacattcacttagatgcttttactgttttcacctcaactaaaacttcaaaaaagttgcagaaaacaaatcgtaactattacgatttgattatatactatattagttgagaagcattgtcaataaaggttgtaaatgaaagcacatttatattttgtgaatccctccataaacttcgtattctcagcacattcaagtctttttgaaaatttttatcaataattgagtagaaattccgtcctcgtcagttcaaaattttatgttagttgtctctgcgtattggtttagtgagaataacccacactagtggaaatttccttttgttaatctacaatggatacccttgtctttcgctaacatttcctattaccaatcctgtaacggattttcatcgtcaagttgctccccatgcaatgcgcaccaaaaaagctttgtacaatttcgtacaaagctttaaaaattcaaataaaaatatcattattttaatgaactagccatatcagattttatttcgtttgctaatacttgtaattcagggaaataattattagcaaagccaattattattttattttttacaaacgtgttaatctctcgatcttctggaatcgtatttcctattaaattcaaaagctcgctatgacttatgttctctatacttactgtatttaaatattttaaaatcgcaagatgcaattcatcaaatacttcatgttcaaaatcaaagtccaataataataaactaacggaattagtttctaactgattatctccaattttatctgcaatctctcttatagcttgatatagcaatctaaaactttctttttcttttaacataaaattctccttaatttattagaatagacaaaatacaacttattttaaagatactccaaaagtttgaactcgagattctgataaattagatgcacgacctacaatacgttaaaactagccttaatcaatacacttcaaatgaacaatatgtgattttcaaagattaattaatctccgcttcatatgtctgtcattgcgacaatatgcatacattgcctacttcatgccaaattattttccactggatatcgattttaaaacaattattctaatgtccgcttccacgaatcatcactcaacatctcgccaggccatgtgtaagccataacaccgccatcaatgcgaattgtttcaccagtaataaatgaactctcatcagatgctaaaaagacaacgagtttgcccacttcttctggtttacctaaacgccccagcggtgtcatccatttctgattttctctgaatgctttgccttccttatcttcacaagtacctgtcagtttatctactaacggggtttcaatcgtacctggtgcaattgcattagctcgaatgccatctctaccatattcgattgcaatggatttagtaaaattaatcactgcccctttcgcagcattatatcctgagcgatacaaatctgctgcctgtcctgaaaatgaagctgtgttaacaatagagccacctttagtcatcattaaaggtaacatcattttcgtcatcaaaaatgttccacgcatatctacattcataatcttgtcatatacatctgttggatactcatgaattctaccagccgcattatccacaccggcattattaaataacacatcaacatgcccaaactgttctctaatttctgatgcaaaattgtcaatttgttgttcgcttgcaatatccacaatataagcctttgctttgtcaccattacttttaattttatcgacagtctccgataccacttcagctatgtctaccgccaatacatacgcaccttcttgagctaaagcgattgcagaagcttgtccgatacctgtacttgctcctgttacgactgcaactttattttccaaacgtttcattcagtcactcctatacaacatatcttaaacttacagtccttattttccactgttcaatgcttcataaacctaatagataagtctccaggcagtcttagctactctctgctatacaatttctattgaataactcaaaatatttaacaatattagatttttcattttctgaaaattgttacttttgagagtattttttgttacactttaaatatttaacaaagggggggaatcattgatgacatcaaaacatcaacaaaaggggtctatcgtcaatcgtttcttgaatagtgttgaaaaaattggaaataaattgccagatcctagcgttttattctttttaatgtgtgtgggcttagccattatgacgtgggttatctcattatttaatgtatctgttaagcatccaggtacgcatcaaaccatttatattaaaaatataattagccatgatggatttacgatgataatgaatgatacgattaaaaatttctcagagttcccagcattaggcttagtactagcagtgatgattggtattggtgttgcagagaaaacaggatacttcgacaagttaatgatttctgttgtgaatcgcgcaccacgtttcttaattttaccgactattatattaattggtattttaggtagtacagccggcgatgccgctacaattatcttgccgccactcgcagcgatgctttttattaaaattggctatcaccctatcgctggactaacgatggcatatgcttccgctgtaggtggctttgccgcaaatatagttgttggtatgcaagatgctttggtctattcatttacagaaccagcaacacgtatcgtttcagattctattaaaacaaacgttgctatgaactggtactttatcgcagcgagtgtcgttgtattacttcctacgatattgctagttacaactaaactaattattcctaggttaggtcaatatgatgatcgtttaatgcatgatgatcatgaagaaacgtcttcacatattactgacaaagaagcacatgctttaaaatgggcaaatatcagtttcatagtcacaattattttattaattattacagccattcctgaacatagctttttaagaaatgctaaaacaggtagcttactagacgatgcgccattaattaacggtgtcggattaattattcttgtcgtatttttagtacctggattagtttatgggattttaagcaaagaaattaaaaatacaaaagacttaggtaaaatgttcggcgatgctgtaggatcaatgggaacatttatcgttattgtgttttttgcagcacagctacttgcatatttaaagtggagtaatttaggaattatcgctgctgttaaaggtgccaaattattagaacatcaaaacggtattgtattgatactaggtattattgtactgagtgcaatggtcaacatgttaatcggaagcgcatcggctaaatggggtattttaggaccgatattcgtaccaatgttaatccttatcggctttcatcccgcattcacacaagtcatttaccgtgtaggagattcaattaccaatccaattacaccgatgatgccgtacttacctttactattaacttatgcacaaaaatacgataaacgcatgaaactcggagccttactttctagtttaatgccgtattcaatcgcgctaagtattgtgtggacagtatttgtcattatttggttcttattaggtatccctgttggaccaggtggaccgatattcgttaaataacagcactcaaggggataaattaaaatgccactatacaagatttgacctgtatagtggcatgatttgttatgatatagcgttcgagatgaaactctgtatttatatgaacaattatagtttatcactaataatatttagtctgttccaaccgttaatttggtttacaacaaagacaagatcaataatttgttcttcatcataaaatgattttagccggtcaataatttcaaacttcttaaagtctttgattgaatttaacatttctgcaaattcaagcgtcactttttcttgatcagtaaataaatctaaatgtctaaaactcaagacttcatcaattttcatttgcgttacacccaattcctttaattcttttttatggatatcaacacaataatgacaaccgttaattttagaaattaataacttaatcaatgcactaagttcatcattaacgggtgattgatgaataaacttttcaccttggctcattacagacattaactctccattttgtttcttgtaattatacggcatttgcaatctctccttctttacattgtttaataccaatccagtgatactacacttcgaacaatatttgatagaatttgaaattctgtataacatcttgtcaatctatactttagttaaaacatttagcgcttatatttaaaaaatatataaaatatgaaaacagattgaaaggatattataccttgctctacccttttttataaaaaatcacacacatttgagaaaatttgataatgtcaataaatcacgtcatcgccattgttattcggtatataatgtttttataatggccaaactattatttcatttacattaatggagttcacttgtgttaatgtactgtaaaaaaactggcgaagtattggtgatgatgaagtgatttatattaattgcgaaacaccttcgatagcaatgaaatagattattggaagattaaatcaaaaaaaaagaagaccctagtggccttcttttttatctaattcttctttgatttcgtcaggtgattttaattgatttgctggttttagtaattcacttaatttttcactttctatcatatctccaccaaattgataattatgttctggagacccatatgcaacaaaatcagcttttttgttttcattgatgtaaccttcaattactgcatcgcccataggtcctgtctttaaacttgtgaaatgcacagttttgatggtattgggttctttggtattatgcttgagatagagtgtaatacgctcctgttgttctttgtagtaaagtgctttttgtttttctttttcgtcatatttcacttttaaataaatgactgtagcaactatacatatacataaaataacaccaataattataaatacatgttttttggtcattaaagcaactcctaaaatgtggtggaaaatgaaaaagtttttatagttctgtaattatgaacattatagattataaatcataacactaatatcgtcgccttcactcactcgattgttaaaatcaccagttactgagaattgtgcaaggaataattgcctatcatgcttttatatcattattgccttactaatattaacaaaaccgatagctattacattaatgcctatctcccacacctcaaatacctttttatacaggacgcactgtaatttcattcacgttaacgtgctttggttgtgttaatgcatataatactgcttctgcaatatcttgcggttcaagttttttacgatctgttggattgtatgcggcagttattgctgtatctaccattcctggagaaatgcttgttactttaacacctgtctttgccaactctttttctaatccttgagtaatagtgtgaactgctgctttcgtcgcactataaatcgtactgcttttcgttacttcaaagccagaaatagatgcaatgttaataagatggccacttgattgttctaacatagttggtaatgcagcctgtgccgtgtataaagtgcctttgatattcacatcaatcatactatcccattcatctacttgataatcagtaatcttagacgacaacatttgccccgcactattgataacaatatccaaaccaccgaatgtttgttgtgcaatttttatcaattcatcgacttcttcttttttcgttacatctgttggcactaccttcacactatcttgagctaattgattcgccacattttgtagtttatctttatttctaccggctaagatgactttcacaccttcttcatgtagtaatgttgcaattgcttctccaataccactacctgcacctgtaactactgctactttatctgttaatactgtcataatgatcgactcctttgattcttttttattttttcagggtaaatcataagtacatattactatttatacttttaaaaagcgtatcacaattcatatgctggttatactaaatcgatttatttacactgataaagtacaatttttagttattcgaaatatacaaatgatcgttgttcatattttttatttttaaaaatgttgaaaaattgtcacttctttattgtaaaagtcgaaagttagtactaaagttataagtattagtaaacaatggcaaggctgttagaaaagggggagttattgtgacatatcatgagcgtgtgttagcactgagagcagaaagaaaaagaactgcatttgattttagattcgaggatttatttagcaaagaagaatggctaagtatgtcgcttgcagaaagacaaaaagccgagaaagcatttcgacacgaagtcaaaaaattagatgatgtaagaatgcccttctcaagtgcacatgatgcccaagtaaaactgtataatgttgtgtattcttacaatggcattaaacgtaatttcaaacaagttgaaaatgaaggattctaatatcatttcgtttatatatcgaggacatgatacagttttatatataatcttgtaggtaatcatactaaaattcaatatagacatgactaaagccacatccaatataggacgtggcttttagtatcgttccagatttgtggggagttagggtttacttaattaaaggggtctgccctcaattgctcaccaacgagggcaagttacatcaatcacacttcaattgccgccgactaggggtagtaatcattggcaataagaactagttagtgactaacgatttacgttccatagcaaagtgatataaacgctcagcatcaatgtaaggcatagaatcaatagttaggtaaccatctttgatgtcaccaattaatccttgatttacaccagtgttcacgtaaatatcatagctacttacgtctgagaaaataagcgcttcaatctcttttctcataatcatcactccaatgtttatatattatttatataaactctctcgtctctctctatttattaacttcttacaagactaatattacatgaatttccaaataaataaaggggtttgtgatgtatttcacaaatttatcactattttggaaaattaagaaatagttaattatataaaagtttaataagtcagaaaatatgataaaatgtagatgttctttagacattaaaagcttctaacatgatacggaatatgaggttcctgtatcacattagaagcttttttgttgtggtgattatattgataatggcatgaatgaacacacgctgtcttagtttcaggaatcggctagaatattaaacttccgttctttgaatattttttaatttcttactaatatcatccagttcattcttcgcctttttaacccaatctccttgagctacattatcaaattcacctttaaattttttgaaatggctactcatttgatttattaaaagctcttcatcatttttcaatttatttttatggtcatggtgaattctgttatgctcgggcgcaataactgcagtaatctgtctcatttgcaaaacagcattaatactcggaacgcttggtatcctttcaacaactgagtcataccacatctttactctctacctcccattttttcaatttcttttaaatattcacttttaagttcatctttagaacgttctattttcatctcttcatttttaattcgctgtgtcatttcatcattaaactcgtttataatatgcgtcattttaacgtttgattcttgactataatccattttgtttttcagatataaaaagcaatcgtatgaatattcacaatccaactttatctgatgcttaatttcctgaagttgctctaatttatcgttcaattttcttctttcttcatcatatgcagtttccaaatcacttattttcttatattcagtaaacattatattacacctgctatctgactcgctaataattggtcattacctacaattgcatttacactatctttaattttagagacgtagttgtgacaatcactatttatatcattcaattcttttaacttttgtttgattttagtttcaggatcagtctcaaacttgctttcatacgcatcaccatttcttaatgctgttagtacttcatcatgcgaaagttttgtccctattttatttccagcttcttgggaattcttccaattctcttgaaatttgtctttcatattatcgtacatcttctccagttggctactttcctctttaactaattgacttaatccctctgttattattaatgcagaaactgattccaacaatttttgttgagatgaggataatgcaccaccatttgcttgaagccaattcgctctaagttcttcaactctccctaattttgatttagtattttcttttaatgatttaaatgccttattatttgcgtcttcgtatcctttaacttttctcaattctgctaaaattttagcttgtgcatatttccttaaaaaggcttccatatcatggccttccccattgttcaaaactattttctcaccagctgtatcatacataaactgactaacaaaaccatctaactcatctttgtcagaaacaaaccttactatatgtccattataattttttaacattttctcaatttctatatctccgattgcacttgccggcatattttccacagcaaatatacgaaaatctctaattgataatggcgccggattatatacaacaatatttttgatatcgttactaactcctaaaataactgcatccctaccgccaagtgagtgcccagttattgtgtcaatttcatattcttttttgatatctttaataaagtcttgagtatctttaaaatgtggatctttatccgttacagtacctagaccaatattgacatcggccctgaaatctttcaatgtttcgtccgcatctttctcgtcttgatcggagtgattaaatggatgttccaaaacatttcccatagcttcaagatgtacatttgtacctgtcatacctaaagtcactttgccagtgtcttcatttttaaaagccgtcgtagtcgtaccagtgtttgggtcagtaaaactttttaagtatgtcaagtttttaggaaaactatcatgtttttttaagtcttgaaattgatcattaattcttctatcagtcaatccattattgttcgcattttcaatttcatagctgattttagatatcgcactagtttcttcggaattacttgttatattaccatgttgaatttcataatcctttttcaccattatttatcacgctctgtcggtttgaaattaatactatccgtaaagtaaacattttcttctttacttgtcacaaaagaaaactctaaatttttatgtcctatagatgatccttttaaatcaccatcgccttttattattaatttcggagctttcttagtaggtatatcatacctctttctaagttgcttaacattatagtcattgttactcaattgatattctgccgaataactaggtacatttggattatatgaaatgtcaccatctttataatcattaatatctttaaagtcaccgtattgtacaaaaaacttaaagttttcaatttcttttcttaatttatcatcagctatcggtttggttgggataattttattatgttccatttttactggatattctttttctttaccacgtgagtatccttttttatcttcccataattctctcacaataaattcaccttttgtcgttctggtattgcggtctacatacagaatcaagcctctcgattccatattctttccatttgtttctattgtcattttagagtgaattatccaagtccctttatcccccttttcaaactcttgatctcgaaacccttctttatcataaaagtcttcaatatttttggttggatacaaactcaacgttttgttgaagttttctttaatttgtttatccttactactttcttcttgtttcattccgcacccccctataaaaacaaatagtattattaaacatagacacaatttcaacttttttgaatgaatcatcttttctccaccttatatttttaatactgactcaatctttaatttatacaactaaaacgaaaattggtttgaacaaataaatttaattgtgaatattttgtattttaaatcttcttaataagaattataaaacaattaaatcaaaagataaagtttctgtgatttattattaatgttaagagttatcataataaccttttacctagtactttataatattttcatttcaatcttctattaacactattcagtaggtttgaaattaatactatccgtaaaatagatgttttcttctttacttgttacaaaagaaaattctaaatttttgtgtcctatagatgatccttttaaatcaccatcgccttttattaataatttaggtgctttcttagttggtatatcatacctctttctaagttgcttaacattgtagtcattgttactcaattgatactcggccgaataactaggtacattgggattatatgatatgtcaccatctttataatcattaatatctttaaagtcaccgtattgtacaaaaaacttgaagttttcaatttcttttcttaatttatcatcagctatcggtttagttgggataattcgattatgttccatttttactggatattttatatctttactttgtgtataccctttactgtcttcccacaattctctaacaataaaattacctttcgatgtcctagtattacgatttatatagagcaccatacttctagattccatttttttaccctttagttcaattaccatctcagaatcaacaatccaagtccctttatctcctttttcaaactcttgatctcgaaatccttctttatcataaaagtcttcaagatttttagttggatacaagctcaacgttttgttgaagttttctttaatttgtttatccttactgctttcttcctttttcattccgcaagcccctataaaaacagctaataatactaaatacagccaaagcctcaactttcttgaatgaatcatcatttcacatccccatttttatttttaatgcaaagttaagttcaaattccaatattaataatactagaggaaattttatgattaaatcctcgtggcttttaattgttagttgtatttttcacatattaacatcacaaattatttaaaaaagcgcaaatatctttataatttttatcggcctaacccactaattaattaagataaattgcgcttatatttaaaataataacactgaaactcaatgtctttacttgttaaaatcgatgtttaaatacatctttactaacattcatttttcggtttacattaatttgttatatagcgatatatatcatctctgacagctttatcgagtgctaaatccatagttactacgtttgaaccattcggcattttatcttgcttctctgaaccttctatatatccagcagttcctaaataataaaaatatataccatcatcatcttttttctgtacaaaaatatacattttaattccttttgctctatgggacaaaattttctgaacttcttttgattttagcgttctattagatttagtaaaccattttaattcatcttgacttaaaaattcatcttcatattttgtgctatcacttatatcttcatgcttatcataagtgataaatattggcatttcttggcttcttatcatgtatcccatgattacagacgaaccatttttattccaattaaatattttgctaaaatcttctcttgaatatttattatataaaatcagtccatttttacctttttggtatttttcattgttatactttgataattcaataagatcttctaaaaatattttaaatgtttgattacttagagcattagtaaatgcatcgcttagtcttatcattctttcattacgttctataatgggacttccatagattttttcaattcctgcgttgtaaaatgaaaaatctaaaattcttaatgaagtatctatatcatcttctgttatatccttaacttcgttcaacattttattttttaattcatcatatgttaattcattttttaaaagttcttctaaaactaaactatcgattcttttcaatccaggtgctatttgtcttgaaaagaaaaccagatttttagattcattttccgtcaataaagcatctatttttttataccttactaaaaattcgtaataattactaaatttagaaaatataacgcttggatctatagaatgttgttgtataaaatccattagtaacggcatgtgtcccaatctattttcaacttcttcataagcttttaatattaatttattttgattcaatgatactgcatccaatgaattgtaaatctgttttttagcaacttcttcaaaattaattgtagatactccattaatcgaatcgttattcgttaaaaacttcttataattatctttattttgcgattgatctccagaaagcgcaatcggaattaaataattggtcttataattaccaataaaatcaattacagtaacatactctttatttgcactttttcttaaccctctaccaagttgctgaatgaatataatactagactcagttggtctcagcattacaacttgattgacttctggaatatcaataccttcgttaaataaatctacagttataatatagttaatcttaccttctcttaatttttctattacaatttggcgatagttaacactatcgtctcctgttaaagcgacacttttaatcccttttgaacttagtttatccgctaaatcataagcttcttttttgctacttacaaaaattaatccttgtaaaatttcacctgaatatccatagtaatctgtcttttgaataatataattaactctttcatcagaagttaaatatctcagtttagttacatcatcttctttaataccttgatgtacataatcagtcacaccaaaataatgaaatggacataaaatatcactttctaatgctgcttgtaaccttatttcatatgcaatattataatcaaacagttcaaatatacttaattcatctgatctttctggtgtagcagtcattcccagcatgaacttaggtttgaagtagttaaatactcgttgataagtagatgcagcagaacgatgcgcttcatcaaaaacaatataatcaaattcattttcatcaaattgcttaaaattatcatctctagataatgtttgaatggttgcaaataaatatttggcatcgacatctctatgttttcctgtcaacaatccaaaatcactatcattttttataggtaatacttttttaaattcttccttagctctatttaaaatcccctcattatgaacaataaataaaaatttattagggtttacttctctaacatctaatgcacataaaatcgttttacctgtaccagttgcagatattattaacgccttatctttggctttatccctaatagcttttaatgaccttaatgcttctgcttgcattaaattgggtacaatttccactgattttttcaccttatcagctagcagcatttgagtttgttcaacctccgctaatttttctaaggaacggtactcaaatgattctttatatgaattaatccattgctcagtcagtggggtactcttttgccataacaagttaaattcactttttacactatcaactaaatcgccatttttcatagtagacagtaaaacattatgctcataattaacctttaacgcattagatgttaaattagagcttcctattaccatagaactataatccttatgctcaaaaatatatcctttggcatggaatccagcaatatcagttaatcttacctctacattttttaatttaagtaattctccatacattttaggactattaaaccctaagtaattagatgttaatattttccctttaacacccttattgcttaaatctaatagttgagcctttaagctagctaaaccgctttctgttataaaagccacagaaaaatagaacgtttcacatttttgaagttcatctataattgttgaaagaactttttcatttttattatttactaaaagcttcggtgtataattacctttatgagaaatatctttgtctataaaccctttatgtaaagattgattgaaatcatttagtaatctactcatattatccctcagtcataattttattaacggctggtatatccgctggggcccaatttaatttatcaagttcgtttattgacaaccattcaatactcttatgttcagttagagttggtaactctttgtttaaagtacatttgtatgttgttaacctaacaattccaaaatcatattcatgttctgtagttataactttgtctccaacaattaaatcacatttcatttcttctctaatttctctaatcaaagcgtctttttcagtttcattcttttcaaccttaccgccaggaaattcccacattaaaggcagactcattttttcacttctctgtgcacaaagaattttgttatcagaaaaaataatagctcctactacattgattacttttttcataagactcacccttcaatttaaaatcatcttaattgttattctatcaaaaattacaaaactatatataaatcaatattaaaaattaatattttacattttcctgcatgatatatcactcttacatctactccatgcattttcatacacatctattatataatacttgtgaaaagtattgtcttcgggctgtgtttttttacttttggggcgtatttctttataattcattacataaatgtaagggctttagttttcatgttttattaagtctaactgagattttgaaaggatgtttagcaacaatggataaagaattatggatagaaagagctaatgatagtttagttaaacatttttatgagcagcaatctgacattgaacagcgagaaggttttgaaagtaaattaacgtttggtactgcgggtatacgcggaaaattcggtcttggtgaaggtcgacttaataagtttactattgaaaaattggcattaggtttagcgcgttatttaaatgcacaaacaaacaatccaacaatagtcattcattatgatattagacatctttcaactgaattcgcccaaattattgctaatgtattagcaaaccatcaaataacagtttatttacctgatacatataaaacgacaccggaattatcgttcgcggtgcgcaatcttaatactactgctggcattatgattacagcaagtcataatccgaaagactataacggcattaaagtatatggttctgatggcgcgcaactatcgactgatgcatctgagcttgcaagtcgttatatcgaagaagttggcgatccattacatattgatatacctatttcaaaacaaaatacatcttatatcaagccatttccgaaatctgtaactgatgactatatgaaacacattcaaaatatgattggctatattcctaaatctgatttacaagttgtgttcactagtttgcatggtacaagtgttccgattgtacctaagttattaaaatctttgaatttcaatcaatttaatcttgtagaagcacaatgtaaacctgatccgaatttcagctcagttcaaagtgctaatcctgaagatcatcgcgcttttgatcaagcaatcgaacttgcaaataaaagtcatgcagacttattaatatcaactgaccctgatgcggatcgacttggtattgctgaacgtgatgcacatggtcatatcacgtattttaatggcaaccaaattggtgcgctgttacttaattatcgtattcaacaaacgtctcaattacgtcaccgcttaatgattcaatctattgtaagtagtgagttaacaaagtcattagcacgctataataatgttgaatacaaagaggtgctgactggctttaaatttattgctcaggaaataagacaactggacgatcatcaaaatatgattttcgcctttgaagagagttacggttttttatcagagccttttgtacgtgataaagatgccgtacaaattgtgccacttattataaaatacgcttctgagttaaaattatatggcaaaacattgaaagatgaattagaacagatttatcaaactgttggtagacatgaggatacattattctcgcatacgctagaaggattagaaggtaagaaaaaaattgaatcaattatgacacatttccgttcaaatccaccgcaagagattcaaggactgaaagtgaaagcaattgaagattatttaactagcgaggtttatcagttggacaaagatacaacgtcgcagattaattctcctaaatcaaatgttattcgtgtcttatttgacgaaggatttatcgctttacgtccttctggtactgaacctaaaattaaattatatgtgtcgttaaaatgtccgaattttgatgatgtagctcaaaaaattaatgcgatgatttttagctaattaaaaattttatacatcgaaatattacatttcattttatacttatcagcccttttgaaactagaatccttatgttttcgcgttttgaaggggctaatttgtaataatttttcaaaagtatattagaaaattaattttcatgtatttttcatattaagcggtaataatataataattaataccgcgacctatttaattgttttcgcgatgaaaaaggtttagaattacaaaaataactattttaaatttagttacaaatatattttagaaaggatgtgaaataatgaaaggctctaaacaaatacttttgattatgggcattatatctcttattgttttatttatttttacactattcatcatggcacaatatgcaaaacattatgaacaaaaatccgacagttccaacgcacatactttaaattcatcatcagccataattgagcaacatactatgtcgaatttagcgtctctagatttatacgctcctgttcgtaacattacttctagtcgtgatattcatcccatttatttcatgacaaaagattaaaacttcctttttcataaccccattcattcaactaataaattaaaaaatgataaaaacgtactgttttttagaaacatacatatataagaaacgcatccattactaaaagacagtacattatattctatcgggaaggtgcaacaatgaccgtcaacatcgtagtttctatcgtgttctgtatcagtatggttatattaggcatttatgtcgcaataactaaagatttcacactaatttcttatataaatcaaacgaccattgcagataaacacaagaaccaaattgcatatatatttgcgttatgtatcagtttgagtgcagtatttttaatgtctgcaattctatgctttgaatatgattttattgcattgtcattcttatttttaacgatagcattattacttatcgcattattctacgtttgcttttataaaattacaaaatacccataaatggttgcgttaaattggtagtaatttttcggtgcgctgtcagtagtcaattaatcgcgaaaaaaatacaaccttgtacgaatacaaagttgcattaatatagaatcatttatgctttttaatatcacaaaataaattgattaaactagctaaaatagtcaaaattggaatcaagattacataaatatcatgacctctagatattagtatacataatataattagcgaccctattataattgctaaattataagccaaactaattttatatttcatttcaattcccaccttaatagcattgattaaaattctattatgtttacatagacttcttaaaaaactttaacccagctaagctaagcattgaaataattgcacctcctgatataaatatattacttaagcttagtaaaggtataattaaacttatcagtcctaaagataatgtatccgctgcgtaattcgatgtagatgagatactaaatactttccccatcaaatgatttggcgtttttatttgaatggcaactgatcttgttagtccctctatagattgtccaagtcccactaaagttgcacctatatatagtatcgccacacttggaaacacattaattatcgacaagccaattccccaaactaaaacaccaatactaaatttaaagattaatcgtttttctgacagcaaccccataatcaatgacattagtaaagacgcaatacctaaacatgatgtagctagtccatatacaccaacgccctcttttaatatattggaaataaacaatggtaatgcaacacgccaaaggccagtattaatcaatatgcaggcaaattgaatgataatgataaatggaatttctttagattgtttcaagaattcccaagtttcagaaaaatcctcttttgagtgtctatcaatcatgttgttatttgtatattttaaaagtgcattaaaaataaatcctaaaaatagcaatatactgcaaataaaaaagatgccaacattgccaactagtattacaatgacaccaattaaagcaggtaaaataatatttgagcctctttgcaaactatcgattaacgcattacttgttgctaaatgctcctcatcaataatttcaggaagaattgccctaaacgcaggatccgtatagcagttaataatggtgatagctgtagatatggttagaatcgtcagataatttaaatttgatgttattgcaagtaaaggaataattattataatcaaacttagtataagatcagatagataaagtattttctttttattatgtttatcagaatatgcgccaccgaaaataccaaatataataaatggtagtgtttgactcataaccatcattgataattttaaagatgattggtttgtcaattcaacggtaaaccaaattatttgcaacgaaaacagcacaaagcaactccgacgtaagaaattaccaatcaataaatatgtaaagtttctatttttcaaaacttctaagtacaacatatttatcacctctcataaaaataattgaatgcatccaccagcctttttagttaagtaatttattgaagacaaatctccataacttattatcacaaaatataaattaagcatgatgctcattcaatttagttcaccatttcgtgttccaattttattgagtatcatgctttttaatgttataaacctaattctttaataaatcgtgttaattcttctcgcatactgtcatctttcaacgcatattctatcgttgttttgacaaatcctaatttttctccaacatcgtaacgttcgccttcgaagtcatatgcatacacttggttatcgttattcatacgctcaatcgcatctgttaactgaatttcgttacctgcgccttctttttgcgtttttaaataatcgaaaatttcaggcgttaatacatatcgccccataatagctaggtttgatggtgccgtaccttgtgctggcttttcaacaaactttttcacttcatactgacgtccatttttagttaatggatcaataattccataacgatgagtatctgcttccggaacttcttggacacctataactgagtgccccgtttcttcataaacgtcaatcaactgtttcactgctggcacttcagattcaacaatatcgtcacctaataataccgcaaatggttcattgccgataaattgacgcgcagaactaatcgcatgccctaaacctttttgttctttctgccttacataaaaaatattcgcaagttccgttgaatactgaactttttctagtaattcagatttacctttttcttttaacaccatttctaattctttttgactatcaaaatgatcttcaatcgcgcgtttatggcgacctgtcactataataatatcttcaattccagctcttgcagcttcttcaacgatatattgtattgtgggtttatctaagataggaagcatttcctttggcatcgctttagttgctggtaaaaatctagtccctaaaccagcagcgggaatgattgccttttttatttttttcaaagttaatgtgctccttttcctaagtattaaatctatgtatcaacgtcattttaacactaattagaacgccttcatagtgtcgttgagtatgtaattatttcttgggaaatttgatttaatataaaaaaacaggcttacttcatataatttgaaatgctcccttcaaagtagacattgaaaaaatgaaaactttgaagggagctttatttatgtcaataaaacctaaagtagacatagatgtactgctatatatgtttcaagaatatgaaaaaggcgtgtcgtttcaatacttaatcgatacattacaattagatattaatgtcaatactttgtatcctaagtataaatattataaaacccatggtattgaaacactacttacacaaaaacaatacaatcactattcaaaggaactaaaattaaaagttgtaaatgaatatttgaattcaaatcaatcaacccaagatctcgcaatcaaatacaatattcgtagttcgacacaagtcaaaaattggataaaaatgtatactgtaggaaaagagattaagagtcaatctccgaaaactggggtgtatatcatgaaagcaagaaaaaccacatttgaagaacgtgtcacaattgttgaatattacttgaatcataaacaatcttatagagaagttgcagaacactttaatatctcatacggtcaaatttaccagtgggttcaaaagtatcaagcacatggtaaaaatggattagtagatggcagaggcaaaggaaaaccgaaatctattatgacgccagaagaacaaaaggaagctgaaattcaagcattaaaagcacaaaatcgattattagagatggaaaatgacgttttaaaaaagtttcaagcattggaaagagagatgattcaaagagaaaacaaatcacggcatacaaaacgattgaagcgttaaaacatcaataccctatccaacgcttgtgtcgtattttaggcatttctagagcgagttattataagtgggtacattatcaatcgagtgaacttgaattagagaatgaacaacttaagcgagaaatagaatcaatctatcataagtataacggtatttatggctatcgtcgcatttatatctatattcgattaaaactaggtaaacaagtaaaccgaaagcgaatttatcgtttgatgaaagaacttaatttaaaagcggtaatacgtcaaaagcgaaaaccttatcgccgttcaacgccacaaatcacatcagaaaataagcttaatcgacaatttgacattgatacgccaaataaagtttggttaacagatgtaacagaatttaaaatcaaagaaggtagtaagatatatttgagtgccatttatgacttaggtgttaaacgtattgttagttatgagctaggcccttctaacaataatcaattagtatttaaaacattcaatcaagcgatagaaaaagtagaaaataccaaaggtattttatttcatagtgaccgaggttttcaatatacatcgaaaacatttaaacatatgttggatgaatgtgacatgattcaaagtatgtcacgtgttagcaaatgtatcgataacggtccaatggaaggtgtatggggtacaataaaaagtgaaatttttagaggaaataagcactttaaatttaatagtgtagaagaagctacaaaaacaattcatgattttattcttttctttaatcatgaaagaattacattaaaaatggctgattctgtataacaacaaaaccaaccattaattttaattatttaattgtctactagactgggtgcagttcaatttatgaaataaacctgtcaatttttgtttaattatgctttgtcattctttttatttctgcgtaataatgctaaacctagaatgctgaataatccgccgaacaacatacctttgtttgttgattcttctccacctgtttcaggtagttcagatttcttagattgtttttgtttagttggtgccactgctttaaccttttcattgatttcaataacaggtgttactaccttaccttgttccactggcttagaaggttttttaggttcttcttttgcgggtggtactggtttaccaggttcagttggtacttctggtgtcggtggtgttggtggcgttgtatcttcttcaatcgtttgttgaccttcgttttgaccgcttacttttggaagtgtatcttcttcaaaatcaacactgttgtgtccaccgaattgataattaggtttatctttatttgtatcttcctcaataatttcattatgtttattgaatccatgaatttgtggcacactgtcgaagtcgatatcaatgatgttaccaccttgttcatacttaggtttgtctttctctgtatcttcttcgaatgactggttaccattattttgaccttggatttgaggtacactgtcgaaatcgatatctacgatattaccaccttgttcatatttcggtttgtcttcttctgtgtcttcctcgaatgactggttaccgctattttggccaccttcgtaacctaattcactcttaatatcaacgtggctattttcttcgatttcttcaatcacgccataattaccgtgaccattttcagtccctaaaccagaatgagaaatatgatgattgttttcagtgatttcctcgattggtccttgtgcttgaccatgttcttcaggtagttcatctactagttcaatcagattactttcagttgtatattctttcgtatcttcaactgttgtatggtcgctcactgcgccagttacaataccttttgtagactcttcgtcaaattcaactaagttagactcagttgttacttggccaccacctgggtttgtatcctcttcatattcaacaacatcagcgtgatgttttgaattttcatgtgtcgattcttcaaagtctacatgaatagaatcttcttcagtttctacaataccttcagcatgaccttctacaccttcaacagctgtatgatattcaaaatcaattggcttagaatcgttactttcttcgattgtaccagtcaattcatgcttctccactggtggctctgatttaatgtttaaatcaattggttcactcttctcaatgataggatcatttggcttatctttgccgtcgcctttagcattattagagtaaaatgcaacgccatttttccaagttaaattacttgtattataatagtaatagttataataaccaagaagatgtgtttgaaactctaatgcgttagtatttgaatcatagtctccctcatactttattacataatttttactttgatctaaattattaaagtttaaagaataaccaccattatctgtatattgtaaagtaacttcccctgttacatcctgaaatttcattgtattttctaaatctccataaacactttcagctaattcatctgagccaatgtgtttatatactttaactgttggatttttagcgttttgtttatatccagatgttacttgaccagttactgtcacagagcttaacgactggttgttaggtttcacatatgcaaaatggctaaatttcccctctgctttatttaaagtatcaattcgcccattaacagtaacccccattctatctttaacaccatctaaatattggatatcaaattcttgtgatattttattttgtcctaaagaaacctcaaccttttgctttcccttcttcgtcactgttgttgggtcgataaataggtttaagtttaattcagcagttaaatcttttttgttatttatataatcagtaaatgtatagcgaattttacgttcatttataacttggccatttgccataacttgattatccgctgaactttttatttctggaactttacgtagtgttgagataccatgagtttcaacattattacttaatgtgaaatcaaaataatctcccgccttaattccttcttcaaagctccatttatattttaaggttactctttcagcgttatgaggattaacaacatttgttccttgtttatgtccttctaaagagctttcagtaactttcactttatttgttacatctgtacctgtcaccttagcttcttccactacttctttctctgaagctgctgtaacgtcagctgatcttttcattcttggtttaatttctgagacgttacttggttgagctgtgtcaacttgagttcccgctatttccttatcagtagctttttccgatggcaaatcaactcgcgaagtttctacttttggtgcttgcacagttgttggtgcttcttctgttgttacttgtgttgattgtgatggttgctcagttgatgtcgcgctgtatgattgtgtttcatctattgtattaacgttatttgtagttgtttgtgtttcgcttgctttactttcagtacctgaactcccactttcctctactgtagtattgttttgttccgatgctgcagcttctttttcttgccccattccaacaacgatcattgttcctaagaatactgaggccgctcccaatttgtgttttcttatgccgtatctaagattgcttttcactataatattctcccttaaatgtaaaattcatttattttttaaactcaataaatgcaattctatattgttcggtttttaaaagcaataaaaaaaagcgagttaataaaaagttaagattgttgttaactttatgtataatgagttttttattatttgaaactcacatatatattgtatacaaagctcttgaacaccttgatataacaggcttttattttttatacttactttttaaattaaattaaaattcatctaatttaaaacaatatactaaaacatacataataatagcctgtacaatgcatcattaacaagtcactgaaacgcctttcattgtattaataacgccaatataatttttatatcgttcggtttttgttagatttcaatgattatttatacagaaacagccgtatttcaggacgacattttaaatttgactaaatttgcatctagttaataattgcatttatcaaatttgtcttattgatttaatctaatttctacttacaaactagttttaaattctaactttatctctcagttcgttatcaatcatcagacataaaccaatgaagcgatcagaaaacactataattttctattagaaatttgatttaatctaaaaaaacaggcttacttcatataatttatgaaataaacctgtcaatttttgtttaattatgctttgtgattctttttatttctacgtaataatgctaaacctagaatgctgaataatccgccgaacaacatacctttgtttgttgattcttctccacctgtttcaggtagttcagatttcttagattgtttttgtttagttggtgccactgctttaaccttttcattgatttcaataacaggtgttactactttaccttgttccactggtttagaaggatttttaggttcttctttggcaggtggtactggtttaccaggttcagctggtacctctggcgttggtggtgttggcttacctggctcacttggcacttctggcgttggtggcgttggttcgcctggctcactcggtacttccggcgtcggtggtgttggcgtttccggctcacttggtacttctggtgtcggtggtgttggtgtttccggctcactcggtacttctggtgttggcggcgttggtgtttccggctcacttggtacctctggtgtcggtagtgttggcggcgttgtatcttcttcaatcgtttgttgaccttcattttggccgcttacttttggcagtgtatcttcttcaaaatcaacactgttgtgtccaccgaattgataatttggcttatctttatttgtatcttcctcaataatttcattatgtttgttgaatccatgaatttgtggcacactgtcgaagtcgatatcaatgatgttaccaccttgttcatacttaggtttgtctttctctgtatcttcttcgaatgactggttaccattattttgaccatgaatttgaggtacactatcgaaatcgatatctacaatattgccaccttgttcatatttcggtttgtcttcttctgtgtcttcctcgaatgactggttaccgctattttggccaccttcgtaacctaattcactcttaatatcaacgtggctattttcttcgatttcttcaatcacgccataattaccgtgaccattttcagttcctaaaccagaatgagaaatatgatggttattttcagtaatctcttcgattggaccttgagcttgaccatgttcttcaggtaattcatccactagttcgataagattactttcagttgtatattctttcgtatcttcaattgttgtatggtcgctcactgcgccagttacaataccttttgtagactcttcgtcaaattcaactaagttagactcagtagtaacctgtccaccacctgggtttgtatcctcttcatattcaacaacatcagcatgatgttttgaattttcatgtgtcgattcttcaaagtcaattggatttgattcctcagaggactcagtgtatcctccaacgtgacccgcttcgctatccacagcagtatggtaatcgatatcaatagctgatgaatccgtttcttctattgtttcaatgtatccatcaacataaccaccttcaccatctatagctgtgtggtaatcaatgtcaagagttgatgaatcatattcttcttcaacagtagtaactaaattcttatcatattgacctgtaataactccagttccatattcttcatcaaatgtcatattattcgattctgttattgttccattcgttccatcaccttttgctttgttactatataaaactaatccattatcccatgttagttggtatcccaaatgagtatagtagtacttatactgctgttctggatatccaaacatatgcgttctaaaattcacttgatctgaaccacttaagtattcaccatcatagtgtataacataacttttttctaatttctcaatgtctaatttataactcccattattttctacttttaatttatctttcatttcctgagttacatctttaaacattgtagagtctgatatgtttgcatatacactttctggcaattctttagcatcctttaagacttcatatacttttacagtaggagcatttccatttgctttgctaccttgagttaatgtaccagtaattgaaacgctatctgatttatgcccattttgtggctttatgtaagccacatgagtgaatctattatttcctttatcgaaagtttcaatagaaccatttacattagcatagctattacttactcctggattatattctattggcaatgtgttttttgtttccttatcattcaacgttgaagttattgtttgttgtccattgctttgtacagttttagggtcaataaataaattgatttctaaatcagcagtcacatttactttataatcaatataatctgtaaatgtatacctaattttcccatttccaagaagttgacctgtcgccattacgactgaaccatttttgatttctggtacttttctagctgttgaaactccataagtatttacattattagacaaggtgaaatcaaaataatcccctttgtgtaaacccttttcgaatttcaatttgtatttcaatacgacacgttgaccagcatgcggctctactttatttccttgaggtgcctcaatagaaccactctctactgtaactttactcgtcacatctgtgcctttaacttctgtaacgtcactagcgtccttagcttcaactacgtctgctgatcttgtcacacgtggtttactttctgataccgttcttggctgtgccacttctacttgtgtttctgccacttgattttgtgtaacctttttaggtgttaaatctacttgtctttgatctccgctattgtcttgagattgtgtcgtttccttaacttgaggtttcgcttcttccttaactacctcttctttaactgtttctacatttgctggttgtgcagtttgtggtgcttgtactgcttttggtgcttcttcagttgttacttgtgttgcgtttgacggttgttctgttgctgttgcgctgtatgattgtgtttcatctatagtattaacgttagttgtagttgtttgtgtttcgcttactttattatcagtagctgaattcccattttcttctactgtagttgtcttttgttctgatgctgcagcttctttatcttgtcccatcccaacaacgatcattgttcctaagaatactgatgctgctcccaatttatgttttctaatgccgtacctaagattgtttttcactataatatctccctttaaatgcaaaattcattaatttttttaaacttaataaatgcaagtctatattattcggtttttaaaagcaatacaaaaaagcgagttaatgaaaagttaagattgtcattaattttatgttaattgataattttattatttgaaatatacctataaattgtattcaagtcatcagaaacccttgtcacacaaggcttgtattttttatacttattttttaaattaaattcatcattatctaatttaaaacaatatactaaacgtttcataattatcgcctgtacaatacgcacaaaaacatgtcttgaaacgcctttcattacactaaaataaccaatatactttttacatcgttcggattctaagtgtttcagacgattttctgcataaaaacaaacgtgtttcgaggcaatatattgtaattacctaaaaacacgtttacttaatatttagttaaacaaataagctgatgaataaaatgaagatgatacctgaaacggaaataatcgtttctaataatgaccatgttaggaatgtttcttttacagttaaaccaaaatattctttaaacatccaaaatcctgcgtcatttacatgagacaaaatcacactacctgcacctatcgcaagtacaactaatgcaacatttacatctgatgattgtaataatggtaagacaatacctgtagttgaaatcgcagctactgtagccgaacctaatgcgatacgtagcacagctgcaacaatccatgctagtaaaatcggagacatctctgtaccttcaaacattttagcaattgtatttccgacaccaccgtcaattaatacttgtttaaatgtaccgccaccgccaataatcaataacatcattccgattggataaatcgcattcgtcactgattccataatatgattcatcttacgttttctcattaatcccatcgtaacgattgcaaataatactgctattagcatggctgtccctgctgttccaatcatataaatgatagattcaaatagatttgtaggtttgtcgtgcccggttacaagttgcgttatcgtagacactaacattaatatgactggtaatgttgctgttaataaactcataccaaatcctggcatctcttgatccgtaaattctttttgtgcacctaacgctgaaatatcgccttctcgtgtatacgcagacggaatcattttttgtgcaactttgttaaatataggtcctgcaatgagtgtaactggaatggcaataatcataccgtatagtaatacatctcctacattcgccttcaattcttttgcgatgactaccggtcctggatgtggtggtaaaaagccatgtgtcactgataaagctgttaccataggtagccctagttttaacactgaaacatttgcgcgttttgccactgtaaatactaatggaatcagtaagactaaacctacttcaaagaacaatgcaatcccgacgataaatgctgcaacaagcattgcccattgtacatgtttttgaccaaatttttgaatcaacgtgtctgcaattcgagttgcaccaccaccatcagcaagtaatttcccaagtatggcacctaaaccgaatatcagtgcaatgtggccgagcgtactgcccattcctttctcaatcgtctccataattttagtcaatggtatacctagcattaacgctgtaatcatcgatgtgataattaatgaaataaatgtatttaatttaaacccaataattaatactaataaaatagcgatacctaaaacaacactgattaacggccatatttcgttaaacatgacattcccctctttctcttttcaatagaatgtaacaccgtcgtcgcgcacgtattccacataatatatagtagtcatggcacaacaactttatctaagatgcttgagtgacgtatttattgtgttttattttcagccatatgttggcgttgaaaatctgcaatttgttcataattctctgttaaagaacgacttaaattgataaaaatggatacgagctcttggtaaacaacgacattttcttcaatcggcgtatgattgtttgtggcaccgaccatcgaagaaacgattgaaaaatcttcaatgtcacctacagctttaagtccgagtacgcaggcacctaagcatgaactttcataactttcaggaaccactaactctgtgtcaaatatatctgacatcatttgacgccataattcacttttcgcaaaaccacctgttgcttttatcatcttaggtgtttcattcattacttcaataagcgcaagatagacggtatacaaattgtaaagaacaccttctaatgcggcgcgaatcatatgttcttttttatgagataaagttaaaccgaagaatgaacctcttgcatttgcgttccaaagcggtgcacgttctcctgctaaatatggatgaaatattaaaccatctgcacctggtttaacacgctttgcaatttgagttaaaacatcataaggatcaacaccgagacgtttcgcagtctcgacttcgcttgctaacaactcatcgcgcaaccatctcaatacgacaccaccattatttacagggcctccaatgacgtagtggtcctctgttaagacataacaaaatattctacctttgtaatcagtacgtggtttatctatcacagtacgaatcgccccagatgtaccgattgtgacagcaacttctcctttaccaacactattgacacccaaattagaaaggaccccatcactcgcaccaataacaaacggtgtatcttcattaagccccattaatgttgcataacgttctttcatacctttcatcacatacgttgttggcactaattccggcaacatttcctcggaaataccaagcaattctaatgccccaacatcccaatctaatgtttctaaattaaacatccctgtcgcggaagccattgaataatcaatgatatatctatcaaacaaatgatagaaaatgtatgttttaatatctgcaaacttagcagtacgttgaaatacatcttgccattcatgtttcatccaaaaaatcttcgctaatggcgacataggatgtataggcgtacctgttcgctgataaatcgcattgccatcatgcacttcatttattactgttgcatattttgcagcgcggttatctgcccaagtaatattatttgttaatctttgatgttgctgatccatcgcaatcaagctatgcatttgcgcactaaatgacacaaatttaatatcatcttgattaactttcgattccctcattatgtatttaattgtcattaataccgcatcaaataattcatctgggttttcttctgagacatcaacgtttggtgtgtgtaaatcatagccgatttgatgtttcatgatgaaagttccattttcatcatataagactgacttggtactcgtcgttccaatgtcgacaccaatcatatatttcatgacaaatccttctttctttcattttaattcaaccaaaatccttcaatatctttaccaacatcgtcgaaatttaaatgaaacgcttctttcaaaatttgactgtcgtattgttccactgcatcaataaacacttgatgattatgatgtatgcgttcaaaatcttgcgggttttgttgcatacgttgtcgcatggatgttaaaacgagtgccatcattactggttttaaatgactccaaaatgagtttaaatattgatgattagatgctttgattaatgtttcatgaaattcaaagtcatgcttcgtaaatgattctgcatcctcaaattttactgccactttcatcatttcaagttgtttcttcatttcttttacgataggtagtcgctctcgatttttaactcttgaaaatgcaaatgactctagcatcagtcgcaaatcgtacatttctttcttttcttgttccccaaacggcaacacatgtgcacccattctttctaattggatgagttgattttgttgtaataatttaaatgcatctcgaattggcgaacgactcacattaaattgctttgccatttgattttcagtgagtaacgtaccttcagctatgtgaccattcacaatgcctaagcgtaattctgctgcgataccttctccagttgtcataccttccaaccatttctctggatatccatacatcatcaaagtcactccttcattacacgacatacttgtatacaagtatgttaatatagttctcaaatgtttgcaagcgctttctttacgcgtactaaaatagtgaccaccccttttcgatgtaaatttaaagggaatggtcactatcacacgaatgacttaattgttatgttgtatgtgggatatttctaattgttctgtacttatatgcgctttaggtacttcaatgcaataatgcgtttcatgacagtttggacattcgaatcgacgtgttgtcgctgtatgtttcgctttgataactgcccacaaagacggtgagaatatatgctggcagttagggcataaataggcaactttgcgttgatagtagatagtcataccaatgccataaccgatcataaatggtaaagcaattaagaacggccatttgtttttcatcaagattgcactcataatgctagaatattgaattattcctataataccagcactaatccaaatgttacgacgaatacttttcatttcagctgatttactcatgacatgctctatgtcttttaagtgtgtgattggagacgtcgacgtttcatttacgtaatattgaacatttttaattttgtttaataccgcttgttgctgtttgacttgttggttaatttcttgttgtttcatagttagtaaagtattgagcgtcttcaaagtaccttcaccttttagcaacatatctatatcgcttaacgcacaacctaaatctttaagcaataagattaactctaatgtttgtcgctgttgttctgtatacacacgacgctttccttctgtaaatccttgtggtttcaaaatacctttgcgatcataatattgaatcgttcgtgttgtcacattgcataattttgcgagttctccagtcgaatagttagacatagattccacctcctacaatcaccatagttgatgacccgacgtcacgagcaagtacaatttccatatttttaaggaatttattatactaggcgtcttatttttgtgatttcgtaccatattgattcacaaactcactcaaactaatcaacactcccactaaacgtctactctgttattttagaatgaatttgttgtaatttatcttcaacttcagtaatctctgtcgcacattctttcaataaatctcgatacttttctgtctctgcattgtttttataacgtattttatgttctaaacttgcccacatatccatacctatcgttctaatttgaatttcaacaggcaatacctcaacgcgttctgctaaaaagactggaatggatacaacgatatgtaaactgcggtaaccattttctttagggtgctgaatataatctttacgttttatcaattgtacgtcttcttgtttaagcaacatctcttcaatcaaataaatatcatctaagtaattacatactacgcgaattccggcaatatccagtatgtgttctttggcagtttctgcgctaatctgtaatcctttacgattaagcttttctattaaactacgcatttctttcacacgtcgctccatatgatgtataggattatgtttataaatgtgattgaaattgtcatctaaaatactcagtttagtgcttatttcctttagtgctgatgaataaatatgatctaactctacgaaacctaataacgtatcaaatgcttcatcaccattttcaaatttacttaaactatttttaaaatcatgtcgcaaatcctctaaatatagtgatggttttcgatctacatacatttttatacttacctccgatatataatcatctttattgtacctaacattttattaagataatactaatacactatcgaactttgggctgatactgaaacagcacaaagaaactcaaacaattcgaattatgtatcaaaaccttcaattataggaagtaattttaaaatgatttaacgcaaaaaaacacctgttaccgttatataggtacaagtgcttaattgatagagatgttatacgtctttaaatgattccacaacttttggatgtggaccatccataagcggttctctttgtcgaacgccaccactttggttgccaattgattcgctatcaaagtacgatttatcttgatttgattgttcttgaatatgttcttcattatcagttgttgcatattcactatccacctctgttttttccattgttgctgtatggaattgtacgaagttctcttcttctaatgctttgatttcttctttctataacgctcgataccaatctttcgcttttttcgccgcaataggaacaacatctttttcaagatatccttcttttaacattgcattcgcaatttctatcgctttttgccgtttaattacttcaaattctttccatttttcggggtaacctttcattgtaaagggcatttccttaacctccaatatgttataattcatgttatataccaccataattataaaatgaaacatattaaacacaattttttagactcccgtcatattaacttcagacaaacgttagtctgacctgataaatattttattttaaacgttcttgtctctctcacgaaaaccattgtgttgaatattcatcattgctgattgaatataattatactgtggtaaatctggtaatatctttatttctaattctgtatttaattctaaatgcttagcgatgttttcaaatgttgctaaatactcgcccattaattgttcatttattgtaagtctatcttcattagccatggctctatttaacataaagctaatttcttctaatgcgaataagctaggataataattttgaatcaatgtcttatcactaaataattcaccattagctgcattataaacttgcgtcatgttatttaatttcacagataggttcatggccgtgtttttctgatacacatcatctttatattggttttcagaaaataaataatggaagagcgttgcttctttacgaacaacttcagccatcacatttgggagtaatgcggatgcggtacgttgtccaaggacaaataaacctatgattgcaatcacaatacccattgcaacgtcaataactcttggaaacgcaatgttaattgttaaattctgtgatgctaatccattcattaaaataacttgtattgtaataaaaactactgcaattgtataatttgctcccaccaacgcttcagtaaataatgctgcaatacccattaaaatgactgctacaggtgttggtatcgaaaacaacaatataacagaaagtactagcacacctaaaatggtgcctaatccacgtgccatacctctctcgattgcatgtatagttgatgttcctaataatactgtatgtgcagataacggtatccagtatgctttttcaaaatcaaacattaacgcaataaatatcgcaatcatcataatcgctgtatatctcaatgtatttctaaaaacaatagagtctaatgttaaattttgataaatgcgtttactatataaaggttttcgcatgtctgcttcatacgcaatacgcgcttcatttgcatgcaccatttcatcaattttcaatatatggttgaataaattttgaaattcctctgttactgtcacttcttttcgccaatatcttacattttcatcactattatctagttgtgcaatgatatgatccatcatttcaattaactcatctggcaatggtctaatttgtttagcgttcaactctaacagttcagaataaatcccttgggcagatgtgtgtaataataataatttttggaaacgtctacttaatttatcgttacttgaagtagaagtgattaataatttatcagatgctttaaaactatccaccgctgtttttgctacttttaaaaaggcagatttatcattataagtgtgtaacaacttagatatgagtttaaaatcattttgaattgcttgttcttcagctttgtttttagaaaatacgattgtgattaacaccatcatagtggcaagtataccgcctactaaaatcgcaaagcctctatataatgcttcttcaggtgctataggtaagttaataggtagactgaatgtcacaatgaagaatgtcgatgacggtccagctatttttaaggcagtaaatatataaaatggtataaccgtaacaattaataatgtcattccaaaaacgagtggcgttttggctgttagcgtaccaagcatcatacatattgcaaacgctaaattacaaattattacagttcgcagcttagatcgcgacggacctttaaaaacataaatatgggctagtgttccagttgcaactaataatccaaattggaaattaccacataagtaaccgattattgcaggaataatcattaacagtccctgtcttacacctttataaaagtctaagttaagtcgattgatttttatgagtgatgtcaaaaagatgtcatttcgacttctcctttccttgtcaaaatatttccataatctttttattagcatagttaaaatgaatttgttgctataaatttcaattacgcaacatatgtcattataacaccttatgctcaattatctaaatttaaaaacttttaaagtccaattaaaattattttctaatgttatttaacatcgttgaacctttggtcgcccacctttgcgctagttaaaatttatttgtgacatgttgagattattttagtgaattatacatttagggttagaaatacattcacatagacttagtgtctatttacttcatattattcctagggttcaagatccaaactatagtgaatttaagaaagtttataaaacatatttgcctcataagcttgaatagttcctatattcgttatttaaaatgacattcgatgtcagttcatttcttaaaatatcgaaagatgattacgtataatatatatagtgacgtatttacaaataatggcagtaagcagtacaaaatgattacacaaaaatttccttctactcgataaattaagaagtataaaataattaaaaaaatacttataattagacctataagaggcaaacttctaatatatttctctaagtttcccttcatatttataacctcctaaaatttatatgtacttttacaagcgttacctgactaaggttttaaaactttatttcttctacatatatcattttaataacttcccattcatcttaaaccatatcggttttaaaatttttcaattttaacgtaaaaaaaagcaataagcctcaacaatgtgaaagcttactgcttgtttaaattatttttctattgctttatcatcactaacaattaaaggttgatctggtttcacatagaaccacataatcacagcgattactgctggaacgattaacaattggaatgtcattgtccaacctaaatgttctacgaatagacctgctaatagcggactgattaatgcacctatattaccccataagttcatccatcctgatactgtaccagagaagttacgtcctaagtcagttgctgctgcccaactcatacccattgaaataccgataccaccaagacctagtgataaccagaaaatacttacatataaatttcctgtacgtacagcaaagataattgaaactgcaaatacaataaatcctgcgattgcaattacacctctagctacgaattttgaacgacctaatcctaatacacggtcagaaattgcacctgctgataagattaagaagaacattaataaccaaggtaatgaactaatactcatttctttaaagttaacgtggaatacttctgttaaatacgtcggtaaccaaattaagaataatgtaatgataaattgtacaacaaagtattgaattgcaattgcatagaagctaaaacgtttaaagaaatcattccatggtggtgatgacttttcagtagctacgatatcacggttttccataatgaaacgtttctccgcttcattaaccattctatgttgctcaggtaagtctttagcaataatcgcccataatacagccattaaaatacctactgcaccaaaaatgtaaaatactgcttgccagttaaatgcgttaacaatagcaattgtaactattggtgctaatacaggtccgaaatatgatcctgctaataatgcacttgatgctctacctttttcatttttagagaaccaaaatgagttaaacacagcattagaagggtacattggcgcctcacccacaccaaataagaatctcactaaataaattaaaccgtggttcttaatcatacccgttaagattgtaaatgcactccaccaaactaatgcaattgtaatcatcttacgtggaccgaatttttcagccaacatccccgatggtacttgcattaatgcataacctagagagaagaatgatgccaataaaccaaattgtggttttgtcatccctaaatcatccatcatttgcttagcgatatatgaaatgtttgctctatccatatacgcaataaccccaataaagaagaacgcaagcgcgaacatccaccttacgttagttcgtttttccttcataactattcctacttccctaattaattttttaaaacttaccctgaaacgttaaaattttcggacatctggcatgtccacccctactttgtcacaaaattgtaccaaagttattttttataatattatcagacatggaaagcgtttacaatagaatctataaaaattttattaaattccgcttaacttttgctattaaaacgatataaaggaacttttagttacatagtagcctatcatttgttaattaaaaatactgcaattctagtgttttaaaacgtatattgcaggctttcttacatattcgacattcattttaaattgcataaaactacattgctcattcattgtgcagcgcctgttatttagatgataatttgttggcttttcgtacttatagcaagcaattttttgttttattgcttataatacattttaagacaaatgcttgtttcaacatcgcatacgacatcattcattattcatttgaatttatccagtttctatttgtctgcaattgctgaaaattaaaggagcttatttttaataatggaacaaattatcactgaatttattagtcgttttgggtatgcagccatttttatattaattttattagaaaatgttttacctatcgtaccatcggaaattattctgacatttgctggtcttatgtctgttaaatcacatttatcaattttaaccttatttattattgcaaccatcgcatcgtttatagggctgttaattttatattatatctgtcgtttgatttcagaagaacgtctatatcgctttattgatcgacacggaaagtggattaaattgaaaagtaaggatttaaagcgagcaaatgattggtttaaaaagtatggcgtatgggctgtatttatctgtcgtttcatacctgtattacgtgtattgattaccattccagccggtgtaaaccgcatgaatgttgtgacatttaccgttatttcattaataggtacaacaatttggaacttcggtttaattttactaggacgcacgttgagcgatagctttggtatgttgatgactggtcttcatacatattcacgtattatgtatgttgtcatcattatcgcagtcatttactttgctatacgttacattggcaaacgtaagagagtaaaataatattgttgttagcataaaggcatgaattttaaatttctataaacaaaaagcagtgaatcattccatctattgaaatgattcactgcttttttaagtttatttggcatactttagctgaaagtcacctatctttatataaagaaatattattattaacatgatagttatagttgtgaagtaaaaggctaccaacggctgagaaatgataccaattaataatgcaccgacagtcattccaatatatctcacaaagttaaatacacctaacacttttccttttatacgttcaaatcttttagaaattatagtagaaagcaaagctggcacaataccaacacaagtacctaatataaatataattactgataaaataattacatttgattcgtttaaccaaccaaacaataacgtaaatatagcaaatccagttatagtaacacgaagtatcattatttcattatatttttttgacaatcgcttataaaataaacttcctaatataacactaacagtaataggtaaaaacaaaactcctgatattccaacgcctatatcataggtattatttaataatgtcggtaaataaactaatattgaaaagtacgtcaaaaatattaaaaatcccaatgtaactaaagtaataaacactttatcggtcaaatatttttcttcaattttttcagttaattttacaatccctttttcaacatttggaatatcaataaaaaagataatcagaaataatacgatagatataacaagcaaaaaactaaaaataccaatataatcccatcttgcacctaaagtactccctaggattggtgccaaagctggcgcacatgataaaaatatttgatagttcgccatagcttgagctctaccattatctgtacttagtttggctaataaagttaaagtcacgagaggaataattccgcaaccaattgcttgaaataaccttgatatagcaaataatataaagttatgtgtcactgcacaaataaagctagatatgattactattcctaatcccgttaaaagtacttttttagaatcacgagaatctatacttctaccaagtacaatttgcataactgcaacgataaatataaaaccgccaactgtcgcatttatccaaaatagtggtacttgaaaatcgtcatatagtctcggaataataggtgtgtatatgttttgaatcaatgatgcgaaaaatgctaaaaatcctagaatatataatctgatattactattagtcatttaaaccatcttcttctttttttaattcttctatactacggtttaaaaactctacaataactgccatttcatcattatcaaagactttaagtacttcttcatatttttttaccgctttttcatgtaattcatcatgtatataagataattttttccctttttgtgttaatgaataattaacttctcttttgttaaattcattgtgcgattcaactactaagtctttcgctaaaagtttttttatcgatttagtaattgctggttttgatacatttaacatttcagacaaaaatttattattcactttatcattattatcaatcaactctatgatatgaaattgtgttagagataaatccagttcctcattttcctttttatactgtcttcttttatcggcattttctctttctataataaattgttgtaactttaaaataacttctctcttcatatccactattattcctcctcttcgttagttaaccggttaactatattattgttgccactcccatttttgtcaaatattgttgtaattaacatatatttacttagttatgcaccatttattccgtaaacccatctcacaaatccatctataatacaaactatcattttaataagcagaattttccctgtcttccacacaaactgttttcgtcactgtaatatgccttctattcaaaaaagtcactcataacaaattgcgcattttaataaatgtagcaatgccatttgcatgctgcaaaaatactcgtattcatatttatgttttatactattaaagttttttaaatccatatttttataacacttgctatgtgataaaattaattttatatataaaatcttaagattcagattatttaatagcaaaggagatagtgatatggatgttttaacaatagaacatttaacaaagaagataggcaacaaaacgattctcgaagatgtatcatttaagctgaaacgcggacaaatagttggtctcgttggagcgaatggtgcaggtaaaacaactttaatgaaagttatattaggttactctagtttccaaagcgggaattttaatgttattaacagcaaggacagcaaaagcaatatcggtgcgttgattgaaaatccaggaatatatccttttatgtctggatatgaaaacttgaagttattgaacgaatcaaaaaacactcaagatatcgataaaattgtctcacaacttcatatgaatgaatacattcataaaaaagctaaaacgtattctcttggtatgaaacaaaaattaggaattgctatagcatttttaaatgaccctcaatttattatcttagatgaaccaatgaacggcttagatccaaaagctgtgcgagatgtacgtgaattgattgtccaaaaagcgcaagaaggtgtcactttcttaatttcgagtcatattttaagtgaattagttaaaatcacaaactctatccttattattaacaaaggtaaaattgttacagaaacatcggaagaagaacttaaacaatttaaagataatgatttagaaaatgtattactagacatcatagaaaaggaggatcaagcataaaatgggaactttaattaaacaagaatgtttcaaattatttaaaaagaaatcaacttttatcgcacctattgtctttattctactaatggttgctcaaggttatattgctacaaaatacaataaaatttttacgccacaggaatctttcacatctgcttataatggtttttcatggtttgcatttttattaattattcaagcaagtacaatcatttcaatggaatttcattacggtacgattaaaaatttactctatcgtgaatattcaagaacaactatgattgttagcaaaatcatcacattatttattatttctttaatttattttgttattacaattattgcttcaattgttattgggtctttattctttaatgatttaaatatatttgaaagtagcggtaatcaattatctttattgaatcaattattattagttagtttaggtacatttgttggcgtttggttagttttaagcttaacgttgctattatcatctgcaactaattcaacgggtgtagccattgctgtaggtattgttttttattttgcaagttctattttagcagttattcaaacggcacttttagaaaaaatagactggctaaagtggaatcctattaatatgatgaatattatgcttcaaacagttgaaaaaggctttagtaagtcgacgaaattagaacttcatgaattgtttattggtaatattgcttatatttctattttcttaatacttgtagtatttattttcaagaagaaaaatatttagtaacttaaagtattagatgtctaaatacacacatattccatcgtaattcaaaatcattttcaaatcccttcacccaaataatggtgcggggatttttgatatgtcagcataccactcattctatcttttatatattccaaaatacccccacttgtaatgtacaaaatatgctcacttaaacgataatcgtatctctgccaagctatttcaactctgctttaatataaaaattattctcccggatgggatgcttatatctctatcatgatatttcaacgccgcttcaacaactttatcacttcatatttatgcgggtacacatcaacgctactaatatgaatgatacaaccatagattctcaacactaaaattcataatatgtttactctatttttatcaattcaagcatacttattgaaaaatgttaacgttttcttgataatcattgtaagcgtattaattttacaaaccaatgattgaaatatactacaggagtgacacacaatgacgcaaattactgaaagagaattaaaaaagaaatatttggatttattatctcaacatttcgatactccagaaaagcttgcgactgaaattattaatttagaatctattttagaattgcctaaaggtacggagcatttcgtcagcgatttacatggtgaatatgaagctttccaacacgtattacgcaacggttctgggaacgtgcgagcgaaaattaatgatattttcaaagacaagttatcaacgaaagaacttaacgatttgactgctcttgtttactatccagaagacaaattgcagcttattaaatgcgattttcaaaattatggacaattaaatgtttggtatattacgacgattgaacacctcattcagctaattaaatattgttcttcaaaatatacgcgttcaaaacttcgacgtgccttgccggagcaatacgttttcatcgtagaagagttattatataagaacaacgaattcaaaaataaaaaatcttactacgaaacacttgtaaatcaagtgattgagcttaagcaagcggatgatttaattatagggcttgcgtattctgtacaacgcttagtcgtcgatcatttacacgttgtcggtgatatttatgatcgtggcccgcaaccagataaaatcatggacacgctgattaattatcattctctggatattcaatggggtaatcatgatgtgctatgggttggtgcttatgcagggtctaaagtatgtttagctaatttactacgtatttgtgcacgttatgacaatctagatatcgttgaagatgcttacggtattaatttaagacctttgctaacattagccgaaaaatactatgatgcagataatcctgcttttaaacctaaaaaaagacctgacaaacatgaacgtttaacacaacgcgaagaaagtcagattactaaaattcatcaagctattgcgatgattcaattcaaactggaaataccggttattaagcgccgtccaaactttgaaatggacgaacgacttgtacttgaaaaagttaattatgatactaatgaaataacagtatacggaaaaacatatccattaaaagatacatgcttccaaactgttaaccgtgataacccagcagaattactacctgaagaagaagaagtcatgaataaactattattgtcattccagcaatctgaaaaattacgtcgtcatatgtctttcttgatgcgtaaaggctcactttacttaccttgtaatggcaatttactcattcatggttgtattccagttgatgaaaatggtgagatggaatcattcgaaattgatggtcagacatacagtggccaagagttattagatgtgtttgaatatcatgtacgtaaatcatttgatgaaaaagaaaatactgatgacttatccactgatttagtttggtatttatggactgggaaatattcttcactatttggtaaacgtgcgatgactacgtttgaacgatactttattgcagataaagcttctcataaagaagaaaagaatccgtactatcatcttcgtgaagatgtgaatatggttcgtaaaatgctcagcgatttcggattaaatccagatgaaggacgcattattaatggtcacacaccagtgaaagaaattaatggggaagatcctatcaaggctgatggaaagatgcttgtcattgatggcggcttttcaaaagcttatcagtcaacaactggcattgcaggctatacattgttgtataattcattcggaatgcaactcgttgcacatcaacaatttaacgcaaaagaaaaaattctttccgaaggtatcgacgaactgtcaattaaacggattgttgataaagaattacaacgtaaaaaaatccgcaatacaaataaaggtaaagagcttcaggctcaaatagatattttgaaaatgttaatgcatgatcgttacttagactaaagacgacatttgatgcacgtgtcgtgcacttatttagaggtgctgtgtttacgcattggctacgcaaatgagatggtaaataggcgacctagctacaccaaaaaatcccctcactattacgagtagtgaggggattggtgtatctatgctagttcctgttaactgtattataacaactttacagtaaaaaagtgcaaaattaactaataaattaataaaatgaccgacgcccttgcttctactccaatttaacaaaatactatattagtactatatttttcattcacatgtatgttacattttctatattacttaaaattacgaagggacatttttaaatcatgcgcatcttaaaagagtccattattgtggcatttgcctttgttggtgttgtcgttggtgccggctttgctactggtcaagaaattttccagtttttcacaagtcatggcgcgtatagcatttcaggcattattgtgacaggactattgattactttaggtggaatgattgtcatgcatacaggtcatcatctaaagtctagaaatcattctgattcaattaactatttcttatatccctctattgcaagaggttttgatattattttgacaatgtttatgttgtctttagctattattatgactgcaggtggcgcgtcaaccattcatcaaagtttcaacttaccgtattggctgagcgcactcatattagtcgtgcttattttagcaacactgtttctaaaattcgatcgtttaattgctgtgcttggcggtgttaccccatttttaattgcgattgtcattatgattgcggtctactatttcacaacgagtcatcttgattttactgccgctaataatgatgctcagattcataagcagaaatcattatcacctggatggtggtttgatgcgattaactatgcaagcttgcaaattgctgctgccttcagcttcttatcagtgatgggtagtaaagttaagtatcgtgactcaacgttatacgggggcttaattggcggtttaatcattacatttttactcatgatgattaacctaggcttaatttctcaattcgataaaattaaacacgtcgatttacctacattaaaattagcgacacaaatgtctccgtcaattggtattattatgtctgtcattatgatacttgtcatctacaatactgttgttggattaatgtatgcatttgcgtcacgtttcagcgttccatttagcagacgttacttcattattattattacaatggctgtcatcacttatattagtacatttatcggtttcatttcattaattggaaaagtattccctattatgggattgttcggtttcatcttactcatacctgtactctataaaggtttaattaagcgtattaccggcaaatctcatatcgattaaaatatctttactattgtaaaatttagtacaacacttcaaaatcaaaaaagcgggcagatgaaaagtaaaaatcttttccatctgtccgcttcttaatagaactgttatttcccaagtatttgttgaccagccgttaatccagtttctgtaatttcatgaccattcacccaaacttcttcgacttgtgccccacgtgtcttaaacaagttaatgacttgttcacttgcagctaatggcacaattggatcatgtttccccatagaaagcaacacactgacatctgataaattctttgttgacgttacttcaattggatataacggtgcatataacaatgcttttttaaatggtgcttctgaacgcaacattaagttaatcgctatatttgatccatttgaaaatccaacaagcacagccttttcaatatcaaaatcataacgttcagcagcttctttaatgaacgttagcaattcttgtccacgaaatgccaaatcttcttcatcataaacaccttcaccaagacgtttgaaataacggttcatcccattttctgaaacttgtcctctaatacttaacaagtgataattttcattcaatgcttcgcctaatggtaataaatcgaactcatcaccacctgtaccatgcaataatattagcgtcggcgcacctttttgtccttctctaaaaatatgttccatcacaaatccctctcattccaattaatcatgttgacgtttcgtattaaaaggtctaacttccgattctatatattctcttttattttctaaaaatggtggtaaggataacccttcgcctaatgtttcataaggttcatcttccataaatcctggtccatctgttgaaatttctattaaaatatgccccacacgtgcatataatgcttcaaaatagaaacgattaacgatgcctgagttgttaatacctacctctttatatttcgttgcccacgcttctattgcatcatgatctttcacacgaaatgacacatgatgtacctcaccataaccttgacgtgctgctggccctttatcatcttttattaagattacctgaccaccattccctccttcgccaacttcaagtaatgcgacattatcttcatgcgcaatagttgtcataccgtaaacagtctctaaaatatttttaaagtcgtcaaaataacttactttaatttcaatgggtcctaatccataaatcgctttatctactggaaccggtccattcttccaaggtacaccaggtgctaccccttcatttaactcatctgaaattaattgatacacttggccatcgacttcttcaaatggcaacacttttttaccaaataattcttgaataccttcgtgtttaacaccaaattcatcaaagcgctgttcataatacgttaatgcatcgtcgttaggcactctaaaagacggtcttgtaatggaatttgtacctgcctgcccttttgtaatatttggaaaatcaaagaacgtcatgtctgtacctgccgaacctacgtcatctgcaaaaaatgtatgatacgtataaatatcatcttgattgactgtttttttaactaaacgcattcctaatacttctgtaaaaaatttataattacgttctgcatcatctgtcattgctgtgacatggtgaatacctagtaattcatgattatttgtcattttatataccctctttatatttttagtgtatttatctcgaaaccgagatattttaatgtaaaattttagtgcacgccttacacttctgtagattgtgcacttagtctcttaaacgcttgttgtaagattgttaattcatcctttgttaacacatcaaacgcttttgttaatgtctcagcatgcttagggaaaatatctgccatttgactttgacctttttcagttaaacaagccatatatacacgtttatcatctttatccttttcacgtgtaatccaacctttgtcctctaattgacttacaacatatgaaatgctgctacttgcaattaatacgcggtctctaatacgttgaattggttgcggacctttattataaagcaactcgagcactgcaaattcagtaatatttaagccatatcgctttacgtcttcttttgtaatttgctctaatgtgtctaacgccctattcattccgacaaagacattgagcgattgtttcgttcgatccatatcatcaccaactttttaatttatttcgatttcgagataaattatatagctgaatggatttaatgtcaagatacgtgttttcatctttatttcaaattgcgcttaataaaaacgactacatagatgtggcaatgtcgtaacatgactgtcatgcacctttgacttcgtttaagttaaaatagaatagggaaatactataatcaatcatgataggagttgatatgtatgagtaaccttgaaattaaacaaggcgagaacaaattctatattggtgatgatgaaaatcatgctttagctgaaatcacataccgttttgtggataataatgaaattaacattgatcatacaggcgtatctgatgaactcggtggtcaaggtgttggcaaaaaactagttaaagcagttgttgaacatgctcgcgaaaatcatttaaaaattattgcctcatgttcatttgccaaacatatgttagaaaaagaagattcatatcaagatgtgtatcttggttaaataaatctcgcgatggtgcgccagtgccatcgtttttttatttgttcgtatcaatataaaattgcgaaacatcatgttattttgcatttcaaactttttgctgtcaattcattttcttttctggtatactttttatactaacttatagaaaaatagaaaacgaggcgatgcataatggcatttcacgataaaacagcaacacaagtgacaaacattgaactgaacgtaagagacttagacttaatgacaacattttacaaaaacattttaggactatccgttaaaagttctgacgataacacaaccgtattatctgttgggactggtggccatactctaacgttacatttattagaagacggccgtcagacttccccacgtgaagcagggctttttcatatagcatttttattaccaactactgaggatctagctaacttcttatatttcgtggcacaaaaaaatatgggcatcggcgctggtgatcatttagtaagtgaagctttatatttcaatgaccccgaaggtaatggtattgaagtctatcgcgatagaccttcatcttcatgggaatggcaaaatggcaaagttaaaatggatactttagaagttgatagccaaaccttattaacacatcgtactgatgaaggttggcaaggaatgccagcaaaaggcatgattggacatttaaaaacacatgatttagacgcagcatatcaatgttacattgaacaattaggattccaacatgtgtctgattttccacgtgcgctatttatgtcaacgaatcattatcaccatcatattgctgctaatacttggcaatccaatcaagcaagacaaaacaatgcacaaagttatggattaacacatgttgatatttatcaacccgacgcctcaacacatacatttacggcaccagaagggtttgacatcacagttcattcaaatactgaccttgttccagaaaaataatcatccatactttattaatacaattttttcacgtaaaagcctgcgattcatttatgtaatcgcaggcttttttattgctaactatttaattttatatatttagacatactgtattctatttattcttttggtccaacccattcaataacatcttcatatgcttggcgtgttttatttttcggtggctcttgttgtctgtaaccaaatgcaaccatcactgataaaccaaattgctcagtatctagcatacctttatttgctaaaatgtctgtcactgtatccagactaaaaccttccatcggacatgaatcaatacctaacaatgcggctgtcgtcatcatattgcctaatgcgatatacgtttgtttacttgaccagtcatacaaggcttgatcattatcagaaatatggaaatctgcttggaatgcatcgaatttttgttcaacagctggaatcgtttgtgcctcatattttttaatatctcttaacatatgttgtacatacggtgatcttgacgttacatttttacgcgcaaaaattagcacaaaatggctcgctgtatctaattgcttcgctgcgccccaactgtgcgcttttaattcatcacgtaacgcttgatcttgaatcacgacaaacttccaaggttctaacccaagagaacttggagacaatctacctgactctaatattgtttcaaaatcttctttcgaaactttcttttgtggatcgaattgcttagtcgcatgtctgaaatgaaatgcatccataattgtttgattcatattgctcattgaacatagcctccaatttttatatttattgctatacaaattatacttcatgttttaaaaagactaaagtaatccgtttgcaattcactataacttgtgcacatgttataagttttctgcaataaaacacacttttgaattttggaaaatttagtgttataatatatttgtgatatttttcacaattaaattgtggcgtgattttaatgtacataatctttaatttcactcatttacttttcaatcttttaaaagcgaggtttttaataatgacaaaaattatgttctttggtacgcgtgattatgagaaagagatggcattaaattgggggaaaaagaataatgtcgaagtaactacttctaaagagctattatcaagtgctacagtcgatcaattaaaagattacgatggcgtaactacaatgcaatttggtaagttagaaaatgacgtttatcctaaattagaatcttacggtattaaacaaattgcacagcgtactgctggatttgatatgtatgatttagatttagctaaaaaacacaacattgtgatatctaacgttcctagttattcacctgaaacaattgcagagtattctgtttctatcgccctacaattagtgcgtcgcttcccagatattgaacgccgtgtacaagcacatgattttacttggcaagcagaaatcatgtctaaaccagttaaaaatatgactgtttcaattatcggtacgggtcgtatcggtgctgctacagctaaaatatatgcaggatttggtgctacaattacagcttatgacgcttatcctaataaagatttagactttttaacttataaagatagtgttaaagaagctattaaagatgccgatattatttctttacatgttccagcgaacaaagaaagctatcatttattcgataaagcgatgtttgatcatgtgaaaaaaggtgcaatcttagttaacgcagcacgtggtgcagtcatcaatacacctgatttaatcgctgcagtgaacgatggtactttgttaggtgctgcgattgatacttatgaaaatgaagcagcatacttcacaaatgactggactaataaagacattgacgataaaacattattagagttaatcgaacatgaaagaattttagtaacaccacatattgctttcttctctgatgaagcagtacaaaaccttgttgaaggtggtttaaacgcagcattatctgtcattaacactggtacatgtgaaacacgtttaaattaatatatatttaaaagcaaaggcgcgccatgtgcctttgctttttattttgtatatctgtatcaaaatcgatttgattaaaatccgctttattttatcatctattcaaatgattttagtgcgcttattttactatggcattattgcctaacctgtttgagatatattaatatttgatgattcgtattcaaagttttcatttaacatgtatttagtatcatgatagctgcttcattgatgatctactacctactttttcaacacttcttgttcgataatcgttaaaacaccctgcttatcattacttggagcgacagcagaggcaatattgaacaattcttcatcatgactattttccatcacataactatgcttagcgaacgctagcatatctttatcattattcgcatctccgaaggccatgagctctgaagaagacattccccatttatctaacaatcgttttaatgcctgccctttagtcatgtttggcataataatatctatactatcgtgcccacttgagacaagtttaatatcattgctgaattgcgtcgctacttcttcgtcaacatttggatgcgtctcacgattaatattaaatgctattttgacataatcatcctcaggtaattgctgtagactgtcaatttcttttaactgatgataataaaatctcgtatcttctttaaatgcttcagaagtatgttttaaaatatacgcgcttttcaaaccacagatgacgagttgatcaataccttggttgatatttaagtaatcgacaacctgttgaaacacctgccaattaaagcttttataattatataactcattgcctttataaataactgcaccattttcagaaataaaatacatatctctatccccgaaaatagacttcaacttcgcatattgattgccactcgcagcaataaatgtaatatctctatttctaagttcagtaaaaatcgcttcaaatcttggtttatcgtatgtctttttcgaatctaaaaacgtcccgtccatatctaccgcaatagccttaaccatgattatcctcctcattgctcttttagtcgtcttcattatatccatctcatgacaagcaatgaagtttgtcataccacaatgaacctatattcacattttgaaattgctttcatatatgcaaaacacattacactggatatagcattcagaggcgaacataaatttcagaatattgtaaaattataacgatatatttatcatttggacaaaatatagtgtgatatactaatttataacatctatacataatgtgaaagaatttttaaaaatacaattaaatatcggtgtaataaatccctttatacataggagttgtatacatgaaactaaataactattctttaaaagttaaaaacaaacaactagttgacaattgtgatttaaatttctatcttggtcagatcaatcacattgttggtaaaaatggtgtaggaaaatctttattagctaaagatttcttactaaataatagtggaaatatccctaagtccatttctcaaaatgtaaccttaatatcaagttcatcaaatattcctaatgatataacaaaggattttttattatcattgttaaaatcaaaatttaaaagcaatcgacaaacattcgataagatttataacatactaaacatcgaagcaataccgtctaacgtactactaaaaaacttgagtgatggtcaaaaacaaaagcttaaattattaagtttcttattggaagatcatgatttaatcatattagatgaaattacaaacgctttagacaagaaaacagttaatgaaatttatgaatttttaaatgattttattcaaagccatcaaactaaaactattatcaatattacacataatttatccgatttaagtgctttgccgggtaaatactttatttttaaagaccttcaaatagaagagtacctatcaaaagaagaagtcataaatgattacattaatttataattgaggtgtccactttgaaattagaatttaaaaaaagtatttccaataaaattatttttacatttggtgtattattttcattccttttcttacttggttattttttgccaataggtattgataaagttaaaaatttaagctatggtcagtttttctttagttcttatacagttgccactgaatttggctttttattattttcatttgttattgcatattttattaataaagagtattcgaataaaaatatattattttacaagctgattggcgataatatatttaccttcttctataaaaaggtagcagtgttattttttgaatgtttagtgttcataattctaagtatcacaattatttcaattatatattctgatttctcacattacttactattaataatcttattttcactcgttatcttacaatatatcttagttgttggaacgattagtatggtttcacctaacattttaatcagcttaggtatcagtattgtatattggattggttcagtcatcttagttgccattaataaaaatatatttggtatcgttgctccatttgaggcgagcaacacgatgtatcgtgccgtagaaaaaatattgaataacgagtcaacatttatttgtcctactgaaattataaatacagtatcattcttcgttcttctatttatagttaatgctattgtcttattactaagtagaaagagatggttgaaaatcggtatgtagtacataaaaaggagcggcatccattgtcgctcctttttattgtatatttttacaacctccaccaatgacacgtcgtcattggtgcctcagaccaaacaaaaaaacagtctcgcaatcaagactgttttccactcaatatattcatccattagcgtaatggattatttaacttctgtagctacaaagattttacgtgtttcccaaacgcctgtcttttcattgtaatcatcacaagtaattaatgttaattgtttatctttacctttttgttcatctagaacttctacatctgtaggcttaacatctcttatacttgtcattttatacttacgtgtttcattaccaactttaaagtacaccatactaccttttttggctgctttaagatttgtaaattggtagttcggacgatcaatgaaagtgtgtcctgcaattgaaatattttgatcatctagtgattcattttcttctgcaaagcttacacctctatttaattgttcaggtgttgctggtcctggatatactggttctttaatatcagcatctggaatttcaatatagcctgccactttcgatttatctttcggaatttgaggtttagcttgctgctttttatccttactcgcctgttcttttacatttttatcatattgttcaatcttttcatctttatctttatcgtgaagataattatcgatatgtggtttagcaaacaaatatgctgccactaggataagtaccacaccagcgattgtcattaatcgatttgtccattttttcatacgttaaggctccttttatacatttcacaatgcctattaacatttcatatagtataccattaatttcaaaatgactcatagcaattcattttatactataaaatttacatgtatacttttacgttagatttcattacacatatttgcattcaaataacgaaacgcttttaataattactaagggggaattgttatgattagatgcgctaaaaaagaggatttaaacgctatattagcgatatacaatgatgccattatcaatactacagctgtttatacttatgaaccacaaaccatagacgaacgagtcgcatggtttgaaacgaaacaacgtaagcatgagcctatctttgtatttgagaaaaatggaagtgtcttagggtttgcgacgttcggttcgtttagaccttggccagcatacctatatacaatcgaacattctatttatgtcgatgcttcagctagaggaaaaggtattgctagtcaattactacaccatttaattgttgaagcaaaagctaaaggttatcgtgcgctagttgcaggcattgatgcttccaacaaagcgagtattcagttgcatcaaaagtttgcttttaagcatgccggcacactgaccaatgtaggttttaaatttaatcaatggttagatttagcattttacgaattagatttacaagactagtaatctttgaatcacataatataaacaagacaaccatgtcaattcacttaacataacaagccaacatataaaatttaaaacttctcagggacaatttacatcgtcccttttatttattcttttcaaatactatccccatagctttgatttaacgctttttctcaataacaaaacgaatatagtagaacatgaaaacgataatcatgctgagcgataaagatttaaataatagattgacccacgttccctcagtcgtatatccatatgtaatcgttgtgttaatgatgaatgctataaagatgattgatagtcttagcatatcatcactccttttaagttattttagatatacgggggcgcttttgcaatcactattttgatgagcatgcatttcccataaatttttcaactttatgaaagataaataagaagcatctatctggtacgaatgatccagacagatgcttcttttttatcaatattttattgttatcttattaattatttttaaccatatcttcagctgtgccaaagattttacgtttaattgcttcgcctgttggtgtgcctgctagtccacccaatccagtttcacgtaatgatgcaggaaggttacgaccaaccttatccattgcttcaataacttcatcaactgggattctactttcaatacctgctaatgctaaatctgctgaaattaaagcgttacccgaaccaattgcatttctcataacacaaggaatttcaacaagtccggctactgggtcacaaactaaacctaataaattacttatcgctaatgccatagcgtgcccggatgcttctggtgatcctccgaatatagctactgctgcagctgccgccattgcagatgctgaaccaacttcagcttggcagccacctgttgcaccagctacacttgcattatttgctacgacacgcccaaacaatgctgaagtgaataagaaatcaatcatttgctcttctgttaaatcatgtgttttttctaatttaaaaagtgcaccgggaatggtacccgaggaaccagctgttggcgttgcacaaataatacccatcgcagcattgacttcatttgttgcaatggcacctttgactgcatcaatcatttcatatccagacaaagcatgatgtgtttcattataatcacgtagtttagcagcgtcatgaccagtgtagcccgttacactttcaacgccatcacctgtcgtccctttgattactgcgtctcgcatgacatctaaattttgtttcatttgcgctcgcacttcatcacgtgatttaccgcttaattccatttcttctttaaccatgatatccgcaaatgacatattattttctacggcataatctatagtctctctaattgaatcaaacatgtttattccccctctaatttatataggaaacgtttacgtcactgtatttctctttaattgtatttaatgtcgattctgagattgctttatttaatggtattacaaccaagcatttatcttcatctatcttaataaattcatctttacagtctaatttcatatcgttgatatcattaatgaaatgatttacttgtgctttagtcatatttccgtcaacaactaaaattggtaatccatgatttaaatctacttctagtccatttatatgaatacctttaattttaattgtaccaccaccgattgaaataccgataatttcaatgtagcgaccatcattacgagatgatttaatataagcacagtttggatgttgaccaatactatcgccttcttcttcgatgatatctattttaataccatcatcagctgcaatttctaatgaagatttaattcggttatcaaatgttgaatatcccattgctccacccacaatagcgacatctgtaccatgtccttggtgtgtttgagcaaatgattcataataatgtatttcaatatttttaggaatatctcccaatattgcgcgtgctgaattcccaatctttactgcaccagccgtatgagaacttgaaggtcccatcataactggtccgataatatcgaaagcactttgataatcatagctctttgccataattaaacactctccttaatatgattctttttgctcggcattttaaagttgatattcattaaattaaacttattaattagtgttccaataatataggctaagacaatactgacaataatcactgttgcgattgttacaattgatgtcactgcattattaaagccaaacaatacgatggcacctgcaattggtgttgccatacctttgacacctattactagtccgctaaatgtcacgatacatgcgttgacgaccccaatcagtgcatttgtaccatatagttgtactggatattgcgctattaaatcaatttgcgtcaatggctcaatacaaactgcaaatgcttttgacggtccaccaatgtttaattttcggaataaaataaggttaacaaatgagctacctgtacatgttagtgctccaatagccataggaacacctgtcagtcctaataaacttgttaataccattgaacttagcggtgtcatacctgtaacaggaatcactagtcctaaaatgaccgctaatgcatatggattgttatcacctaccgcagtgacagcactacctatttgttttaatgttgctagcacaccaggtgtaatgattgatgcaagtccgaaagcaattgctggtgcaaataagatcaccacaattaagtccaagccttctggaactttcttttcaatccatttaattaaaaaagctacgccataagctgcgatgaatgctggtaataatttaaagtcatgtaatactaaaccaacaatgaccgcaaatactggtgcaacgcctaagtttaagcacgttagaatacctactgcgataccgcttaaacttcctgctaaatccccaatatcttgtagaaatttaatatcaaatacgccaccaatagcgtaacttaagaatgcttgtggtagaaatgtcgcacaagctgcaccggataatgcttgtagtccttgtttaccgtacggtgcatactttaaaaatagcgtcatgatcactaaaaccaagactaatgtgcctacacctaacagaatatccatttcccaaaaacctctctctatgtttattttattttcagaccataaacatcgtacacccttaagaaaacgttttcaacttttatctgttatcaaatcaaatatttaagtgaaatatttcatatttgtgaaagatttttaaaatggattgtttcaaaaactacttatgttgtcattaatatttactaattaactttttactctatatttcaaacagttgtgtgacagttttttgataacttttttacatctgaaagtaagtaatatttctaaagatttttaatatttatacattttatctttcgagctatttatttttgtttttgtgctgtgtttataaaaccgcacactatattcaaaaataacttattacacatatatttgcaataagataattaaagtaggatattatttttagttttctgataggaatgatgatagtctataggttgaatctttactttttttaaagctaaatttacatcaacttaacaatggctggttatactgaagatgaaaatatttagtataacttagtggaggcggtaaagatgcaattgagtcattccgttaaagttgcaatttctatctatttagcacttatctttataacgttcacttcttatttagtcattattttatatacgagtatgactggacatgatgtatcacatttcgtgttagatagtcagcattctcatcatggatctcttacgcaaaaacatttgagtcttcctgaaatctcatttaaatagtttatcctctgtgtttcaacattcatttcccatatcaattcatttatctatcatctagaccactacatcttagatgatttttttattttctcatttcactctttcttaaaagtcgatataatgaattaaatcattatcatacactgacatattttatgttgttggtgttaagttttaaaggggtgagatacttggcgaataatcattcagctttgcgtttaaaaggaattatacttgctattgtcggtgcttgtttatggggattaggtggtactgtttctgatttcttgttcaaatataagaatattaatgtcgattggtacgttactgctcgacttctagtcagtggtgttttcttacttattatgtacaaaatgatgcaacccaaacgttctatatttagcgtattccaagatcgtcgtatgttaggcaaattacttatcttcagtatactgggcatgttagttgtacaatatgcttatatggcatctattaatacaggtaatgctgcgattgcaacattactacaatacattgcgccagtttatattattatttggtttgtcataagaggcgttgcaaaactaacattatttgatgtgattgctattatcatgacactattaggaacatttttattattaacgaatggttcattttctaatttagtcgtcaatcctgcaagtttattctggggtattttagctggtgtagcactcgctttttacacaatttatccttcagacctacttaaccgcttcggttcgattctaattgtcgggtgggcaatgcttatttctggtgttgcgatgaatttacgccatccaatttggcacattgatatcactaaatgggacatatcaattatattatttttaatctttggtattatcggtggtaccgcactcgcattttatttctttatcgacagtttacaatacatatcagcgaaagaaacaacattattcggaactgttgaacctgtcgtagccgttatcgcaagcagtctatggttacatgtggcattcaaaccatttcaaatcgtaggcatcattcttattatgattttaattttattactatcacttaaaagacaacctgaaacattagatgaataagaaaactctgataatcactttagcaagtaactattttagcaatgtagctaccttgtatgtgatatcagagttttttattttagttaataatattttttacttggtataaaaagcgtcggcgctctggtatcggaaatactggataaatatggaattggtaatatccaggtataaagtcatgttcgatacctttcgcactcaataattgcgataagttcaaagcatctgggtatagtacttcttttgtgccaacagttaatgtaatacgacctaaaccatctaagtcaccattaattggtgatactttgtagttatctaaaggtgtgtcccctgcccattgttcagctaagaatacactgccatccacacctaccattgggtctttctttaagtagtcaggaatttcaggatgctgcatcgttgcatctaaaactggtgaaattaatacaatatgtcctggttgcacaatatgtttttcttttaacaattgagcaaatgataaagcaatttgaccgcccgcagagtcacccattacaacgatttgtttagaatctgctacttgattcaataaatcatggtacaacttttcaaaaagcacatacgtcgcttgataatcttgatgcggaatcttcggatatactggcatgatgactttagcattgagtgtttctgcaagttcatcaataaattcgaaatgaattttgagtgggtcttggaaccatgcgcctccatgtgcatataatacaacgcgttgatgcttatcttgtttatcgttaacggtataaacggttgaaccgtagtgcttatccactgttactggcatcttaaactgataattggtgccctcatattcacctgctgtctgtggcgccattttttctaatgctttcatcgcttcttctttatacataaaacgacgcttagctctagataatcgtataccttgttctaacatataacttttcacactgcgtttttctttaattctaatatgtgcgtatgccgctactaaaaatccaaacgcaagtgtagaccattttttacgcatttgtcgtcactcctctttgatgatttctactatagttctactgtaccatgctgattcttattactaccaatatttactgggaaataagttatgatgtctacataatcttagcaatgctaatcatttgcgctattaatgctcatcgacatcgttattcacactatcattcatttgcttaagatgatgttcaaaacgttgcatatcgataaaacgcccttgacgatgcatttcttttccattcataaaaattaaatccacaggtacagtgaaaatatttaattctccagcaatagcttccacctgactttgattaatcacagctaatggcacattgggatatgattgcatcaagtcttcaatttgtggtaaaacggcatgacacacgctacactgatcgcgcatgacatgtacaactgctaacggatattgatgaataaattcacggaatgcttcgacactatttaattgcttaaccatttcgaacaccttcttactttttatattttaaaatgaggtcattattttgttgctaaaatgtcttgaaatacttgtggcacagaggtaatcttcttatcgctcaatctgtaaaaaccgcctgtctgtgtaccaatacaatacacgccatgtgcggacacaatttcaaactgaaacacccatttcatcttgcttgctttaactaagtaaatacgacctactggtttgtcatgtattgtgacaggtactttatattctgcttccgttttcataagtataggtgaaatgccttgattgatcattgttgagtaattcatgtgctgattaataaacgctgttctcaaatcttcgaaccatctaatataaacgatattactaacgacacccatcgcatcaatgtcgtaaccattcacttcgatttctttctctgcaactaatagaccttcagttgtcataatgacaaatctccttatcttacaaatagatttaaaatcatgttaatttatttttattactttcatgataaaaatacaagcaattgaactttattacgggaaatcaaacttttcaatgacgctattaatttggctagtcgcgaagatgcatttttctaaaatgcgacaaaaacataagcaatgttttctatatctaacactaatatttaacttattctcatcaacacacctgctatacatcattgcgcactaaaaaggcagtagcttcattttaagctactgccttttgtaacgtattctctttcaactcgctacttcgcatacgcactacgaatgactaaaagttcattcatttgatatgctatttcattttcaatcattatttgactgtcataattagcttacctggatcagcatcttggacatcttcaatgacaagttctttattttcaagatttgtaataatcattggtgtaacgatgcttggtgcgtgcgctttcaagtatgctaaattcactttcattaatggttgaccttgtgttactttttcatcaacgttaatcagactttcgaatccttcaccattcagtttcactgtatcgataccaatatgaataagtacctcgacaccactttcagattctaatcctatcgcatgtttcgtagggaagattgttttcactgtaccatcaaacggtgctacaatttcacctttttcagggataaagccaacaccatcacccatcattttaccagcgaatacttgatcaggtacttctgataatggaatgatttgaccgacacctggtgcatagatgtctgttgttccaagtgcttctacgtgaactggttcatctgacatttcttcagtcactgtcgtttcacttggtttcgtaatttcaccactcataatcttggccatatcatgtttaatttgatctgattttggaccaaagatagcttgcatattgtttccaacttctaatacacctgatgcgcctaaagctttaatacctgctacatctacttttgatttatcaaccacttctacgcgcagacgtgtaatacatgcatctaaatgtttaatattttcttttccacccattgcatctaagacatcaaatggtaattttgcgacactagagttacgaatttcagtttcttcatcttcacgacctggtgttttcaatttaaacttacgaattgcaaagtcgaataagaagtaatacacgatagcgtatacaataccgactggaataactaataatgcgtgtgaacgatcccagtttaataaaccatataaaatataatctatgaaaccacctgagaatgtcataccaattttaacgcctaataaatgcattactaagaatgatgtaccagctaataatacgtgaattccataaagtactggtgctacaaataagaatgaaaattctaatggctcagtgataccagttaaaaatgcagttaatcctgctgataacattaaaccacccacgacttttttacgttctggtcgtgcatttttataaatagcaaatgctgccgctggtaaaccaaacatcatgaatggatatttaccagtagtaaatgcaccagcagtaaatggtacgccatctttcaattgtgccatccaaatacgttggtcaccacgaactaattcacctgcgtgatttgtataacttccgaattcaaaccagaacggtgaatagaaaatatgatgtaaaccaaatggaattaatgagcgttcaataataccgaatataaacgttgttaatgttaaatttttatttaataagaaattcgataaactatttaatccgtcttgaattggtggccacgcaaagcttaaaaccacacctgttgcaattgctacgaccgatgtcacaatcggtacaaatcgtttacctgcaaagaatcctaaaaatggtggtagtgtaatattataaaatttgttgtaacaccatgcggctaaagcacccatgataataccaccaaacacacccgtttgtaatgttggaatacctaatactaaggcatgtgctggttctttcgctgcttgacttaattcttttgcccctttggcatatgaaaaaatgtcatcaattgtaatgtgcaacactttccccattgttgcattcataattaagtaacctactagcgctgctaatgctgcaacaccgtctcctcctgctaatccaagtgctgtaccaactgcaaataataatggcaagttatcaaatacaacttgtcctgctgcttccatgaccgacgaaatcattacaatgatatcgttttttaaccatggtgcaatttctactaattgttcgttgtgcattgcgttaccaaacgctaataaaataccagctgctggtaaaatcgcaacaggtaacattaatgctttaccaatacgttgcaattgtccaaacaatttcttaaacatataaacatcccctatctcaatttccgcttccatgtacaaaaaagcaggcatgaacaaacaagactattctcatagtacggttgtttgctcatgcctgcattaccagtaacacgcaagtgatatgtaattcatagatattatacatatttgtaaaagcgttttcaacaactttttcacaattttatcatcaatgcagtacaatcatttgtgataaataaacaaaacggcaattcccattttgttgaaatagaaattaccgtttttatagttcaattcaattgtgataacctttcaatcagttataagaaacgttttgctgcaactgaaataggtggaatttgatctaaatctaaatatttatcttcagtaatagatctaaatgcccatttaccataaccaagcgcttcttcatttacaattttacctggtaatggcgcagcattaggatcaacataaacatctacaattgttggtacatcttgtgctagtgcctcttctacaatagcatctacttcgctagcacttttaattgtataacctttaccacctgctgcttcagcaaatttggcatgatccatatcagagaaatcaaccgcatattctaattcaccagcagctttttgttcatatttaataaacgctaattgcttattatttagaacaaacactgttaaaggtaaatcatattgtacagctgttgcaaagtcctgcatcaccatttggaatgcaccgtcaccagcaattgcgatggcttgtctatttggatatgcaatttttgatgccattgcacctggaagaccgcaacccattgtacctaaccaacttgaaatgatgaacttgttatttacaccaaggtttaagtatcgagttgaccaaactgttgctgtacctacatctgctgaaatcactgcatcatctttaataaatttattgattgatgccattaatcgttctggacgtaatggtttactattattatttttatcttgttccatccatttatcccaaaccgctttacgttctaacgttttgtttaagaatggtctttcagcaacatgtttaatattttcagttaactgatgcaacgcaattttactatctccaacaattcccacattaatattgaaacgatgtccgatatttttaggatttgtgtcaatttgaatggctttaatatttttcttaggtaagtaatccacatatggatagtttgtaccaaccataattaataaatccgcttcctgcattgtttgataagatgttttggtaccgattttacctaagttaccgatactatatggatgatcatccggtaagattgttttagctggtaatgaatgaatgacaggaattttagccatttcaataaattcacgtagctcatctttcgcatgtttcgcacctacaccaattaacatgacaggctttttacttttattaattagtttaaccgcttttttgatgtctttatattttggtgatacaactgttggtcttgatgtatctactggtttattcgttgtatctttaattttttcagttaataagtcgttaggacaaataacaacagcgacacctttttgttcatatgccgtacgaattgcttcgttaacgatttcaaacacattgtcacctttttcaatttggtgattataaacggctacatcttcacataatttttgtaaatttgtttcttggaatgctttcgttccaagtgctgtactattcgtttgtccagataatattaattgcggtacattatccattttggcatcgtacataccatttaataaatgaattaaaccagggccaccgatacttaatgccacaccgattttaccagttaattttgtgtaaccagcagccgctaagcttgctacttcttcatgacgtacatgataaaatttaaattgatctctcactgtacgtaaactatcgacaactgcatcgattgagtctcctggaataccatacaagtgatctatatcccatgcttgtaatgctttaactaatgcttcatttgcttttatttttgccattattactaatagcctccctttcttagtgtctttttctaattagtaaaatagtaagatcagaacaggtattaacactgaactaataactgcagttaaaatcatcccaattgaactaaatgcaccggattcaatatccatttctagtgctttagctgtgccaaatgcatgtgacgcattcccatacgttaaacctttggcgatagaagattcaaatcttccaaatcttaataacatcgaacctaaaatactaccgattaaacccgttgtgataataaaaagtacggtcatcgtatctgtaccacctagttcatgtgacacttcgatacctactgcggctgttatagatcggggcaataacgttacaatgacgtctttagaatagccaaatgctttaagtgttaagaacactaacatgaaattcagcatgacgccagttaatacacttgcaaaaatgatagagacattgtctttaattttctctctatttttataaagtgggtacgctaaacatacgaccgttgcgtttaaaatatggttgatccaactgccacctttcatatacccgttataactaattccaaagataagtaagacaaaaataattcctaaagatgcaattaatgctggattcaaaaatgggttcggatatttttgttgtaaccttttagcgaaataatataaaacgacagtcaacaaaatcattaataaggcttgcacgtaatcattcataagcgtctacacctttacgatgtttatgtttaacagacattttttcagcaatataacctgatgataatgcaacgatacatgttcctatgataatgactgcgaaaaagagtatataatttagtgtaatttcggaagcaacatccataatacctacaactgacggtatgaagaaaaagaccatcgtctttaataaaaagtttgcaccgtcttctacccaagttagcggtacaatcttaaattgtaatagtaaataaaataaaaatagaccaacaatactgccggctaagggaagatgaaaaatcttttgaatttctgtgccaatataagtaatcacaatgatgattcctagttgtagtagtagtttgattattaattggactttgtgcatggcgccatccctttctaaatatgtctaaattgttacaataactattataaagatggcgtacacaatataaaaatactctttttttatagtttgtattactattttctatggaaacgctctctaaatttcacttcattttcacaaaaaaacactcattatttcaatgacccacgtaatgatgcgccttaaataatgagtgctgtattaatatgttagcctaaacgatctttcaaaaattctatccatttcgttgtggcatgacttaattgtttatccttcttccaaacaacacctaattcccaatgtacatgcgcatcttcaatgcgtagtagcttcacatctccatttagttgctctgaaattgatgttggtaaaatactaatacctaattcattcgtaactaaatcttctataacatgccattgtgaaatttgcgctacagtattcggaacaaagccaacgtttttagcattttcaataattttatcattcaagtaaaagtctttattaaataaaatgaagtcttcacctgctaaatcttcgagtttaacggtttcatattttgcgagtcgatgctctctgctcacgataagtcgcaaatcttccttatctagggtagtataatcgaaaatatgatgatcgactggcaaagtggtcacgcctatatctacttcatcattgataatttgctgctcaatcgtttttccgccattttctattaaattatatgtaacatttggatattgttgatggaatgcaccaagaatattgataagaatcttcatattcatgactgccgacatgcccatgtttatatgccctgtttccagtccattcaagcgttccatttcagatggtaaataatcatacagcgcaacaatttctttacttttctcataaaaaatttgacctgcatcggtaagtattaaatgtcttttacttctatcaaataagggcgtgcccatttcattttcaatatctttaattgctttactaattgtaggttgtgcaatatataatgatttggaagcattagtcatgcctccttgctttacgacttcaataaaatatttcatatgtttgatatccactaacatcatcctaactatttcaacacgtttatttcattatacacaacttcttaaacattcaataaatttagatttataaaattgctttataaaaagtttcatgtaaaatacacattcttttatgttattataataatggctcaagtatattaatcgaggtgaggtattgagcttttacgaatttatgcaaaattttcttggtgatgacacaccattaggtgaattggttgattggattaatcaagatagcaatttccctagagaagtgaagagccatagtgaaatattgtcatattttcgaacaaatccatgtcctgaaagcatctcagtacctgtaattaaacgggcactatcagttttcaaccaattcacaaatgtacaatgatacatgaatacatggagtcacatcatctcatgttagcgctctgattgcagggcgctatttttaatgctatcgcttcatttattgtgttgtgattgctattttctttcagttatagaatcaggtatcttttcttttaaatcattttatattttcccactagtatctgctgttaatcaatcctgacatccttgtatcactatgacaattaattgttagatacatgaatttctacattttatgaaaaaatccatttttattacaatttaacactttatatgacaacttcattacagttacttttattgttgattgcttgcattgttttctaaaaaaattttgttatcataaataacgttgaataaagaaaaaaattaacttgggagataaaaatggaatataaaaagatactaattcgtttattaattgcttttgcagtacttttctcagcagatttcacttatcaatccgtcgaacaaacgcatcaatcgcatgccgcagttaattattatagtaaaaaccaatgtacatggtgggcatttaaacgtcgtgcacaagtcggcaaacctgtttctaatagatggggcaatgctaaaaattggtattacaatgcacgtaaatcaaaatatgcgactggtcgtacaccaagaaaatttgctgtcatgcaatcaactgcaggatattatggacatgtcgcagttgttgaacaagtatataaaaacggtagtattaaagtttcagaatacaacttttatcgcccattaaaatacaatacacgtgtactaagcaaaaaggcagcacgtaactttaactatatttactaatcaaaaaacttctatcacgaacgcttcaaattcctgtatgcgtgtgatagaagttttttattttttgttcatattaatttatctaagcgctacgatggactgacttaaacttttctttaaaaatcgctattcgcatttgattactgttggcttcttaaatcttgtaaaatgcgttcagctacttgtgtattcgcacgaggttcttgcttcaatgcttcagctacttgcgcaatttcatcaccttttgcacctacaacaatagctaaagatttatattgcaagctcatatggccttgctggataccttcggaaacgagcgcgcgacatgctgcaaagttttgcgctaaaccaacggcagcaactacatgacctaattcttgtgctgaatctacatttagcaattctaaagaagctttagcaattggtaatacttttgtaccaccgccaacgattgccaatgtcataggcacttctattgtaccaattaaacgttgacattcttgatcgtatctccatgttgcaataccacgatattgtccatctctactagcgtatgcatgcgcacttgcttctgcaccacgcgtatcatttcctgttgctaaaacaacggcatgtatgccattcataacacctttattatgtgttgcagcacgatgaatatcaacttgtgccaatacagaagcacgttccattcgtttggcaacctcttctccagttctctcgccccttgctaaatctttaacgtcaatttcgccttgaactttaacaacggacgctgttgcatgattggataaaatactcattaaaatgtcgctttgcggaaattcattttttaaaaatgcagttatggcctctaaaatcgtattaagcatattagcgcccatagcatctttcgtatcaacaaatacttttaaagatagtaactgttgctcaggaaatgtatcaatagctatacgttggtaaccaccaccacgcgctttaatagaaggatatgcctcatccgcaattttatgaatttgcttttctaaagctttaatgtctgctgataatttttcagtatcgtcaacgccatcaaagacgatttgacctatcataatacgttcagaagataccgttttaaatccgccagtctgattcactagctttgcaccataactagctgcagcgacaactgaaggctcttccaccatcataggtacaacatatgccttatcgtccacaatgatattcggtaataatccaacgggtaatgcaccttgcgcgatgacattttcaattaaactatttgctacttcctcatcaattaatggatgattcaataaaatgttgaattgctcttctgataaccattgcttatctaccaattgttgtaacttttgttgacgagataaatgtcggaaattcttatctaaactttgcatggacatactccttttacttcacataattttttaacatttcaatcactactatttttaccataaaataacgttattcgtcttaaaattcaattgaataattgttgttttaactataaaataaagcaaggtaaattaaaacgcttacaagaaacgtcaaatcatttttaaatttagtgtatttctttgtataagattagcatattctgatatgatacaagtgttgcttttataaatttgaaaggatgtaaaaccttatgacaataggtatcgacaaaataaacttttacgttccaaagtactatgtagacatggctaaattagcagaagcacgccaagtagacccaaacaaatttttaattggaattggtcaaactgaaatggctgttagtcctgtaaatcaagacatcgtttcaatgggcgctaacgctgctaaggacattataacagacgaagataaaaagaaaattggtatggtaattgtggcaactgaatcagcagttgatgctgctaaagcagccgctgttcaaattcacaacttattaggtattcaaccttttgcacgttgctttgaaatgaaagaagcttgttatgctgcaacaccagcaattcaattagctaaagattatttagcaactagaccgaatgaaaaagtattagttattgctacagatacagcacgttatggattgaattcaggcggcgagccaacacaaggtgctggcgcagttgcgatggttattgcacataatccaagtattttggcattaaatgaagatgctgttgcttacactgaagacgtttatgatttctggcgtccaactggacataaatatccattagttgatggtgcattatctaaagatgcttatatccgctcattccaacaaagctggaatgaatacgcaaaacgtcaaggtaagtcgctagctgacttcgcatcactatgcttccatgttccatttacaaaaatgggtaaaaaggcattagagtcaatcattgataacgctgatgaaacaactcaagagcgtttacgttcaggatatgaagatgctgtagattataaccgttatgtcggtaatatttatactggatcattatatttaagcctaatatcattacttgaaaatcgtgatttacaagctggtgaaacaatcggtttattcagttatggctcaggttcagttggtgaattttatagtgcgacattagttgaaggctacaaagatcatttagatcaggctgcgcacaaagcattattaaataaccgtactgaagtatctgttgatgcatatgaaacattcttcaaacgttttgatgacgttgactttgacgaagaacaagatgctgttcatgaagatcgtcatattttctacttatcaaatattgaaaataacgttcgcgaatatcacagaccagagtaatctgtgtatttgaaagacatttaaatacaacctaaaaacagcagtaagacagcttctcattgaaatcgtcttactgctgttttctatttataatgcttcgtcttgaatgaattcattatgcctatttgacatattattgaagttttcctattgcctggatcctttatacgttacggcttcgtgctatgttttggtacataaagctttgacatatcgatattctccaactctaacagcttaattttattattaatcgttccaccgaatcctgttaagctacccgttttaccgacaacacgatgacatggcacgataatagataatggattacttccgactgcacctccaaccgcttgggctgacatttttggcttatcaagtaccttgcctacttttttggcaatagcaccatacgttgttaacgtcccataaggaatccgtcttaattcattccaaacacactgttgaaaatgactacctgttggctttaaaggtattgtgatttcaggattgtcccctttaaaatacgcgtctaaccactgtgtcgcctctttaaatatcgctaaagacgtattttcttccctagtactatcatcttgttgattttcaaacaaaacagcggtcagacttaccccatcactcacaagttccaatcgtcctacaggcgaatcatagtaactcttatataccataaacacacactccttttgcatcatcatactattcatttaactttatgaaaatgattaacactttatgctttatcaagatcaactattcacttccaaatcaaaattcacatagactaccaacacaatataccatttcttaattaactatgtatcaacacatacatttcttaaccattgattaatatttacttttaaattcttacttacttcaaaaattacacaaaaagttcataaagtgcctacaatgcgccgtttttaaaactacaatcgtggaaaaatagaattgccattgtttatagtttgcatatagtttcaatgtattttcttttacttattagtttaaaattttagaggtgatgtttatgaataacaattttttcaatagtgacttcgattctattttgcgaagaatgatgcaagacatgcaaaactcaaatcagactagtaacaagaaatactatattaatggtaaagaagtttcaccggaagaattagcacaatttacgcaacaaggtggtaatcattctgccgaacaaagtgcgcaagcttttcaacaagcagcactaagacaacaaggtcaacaaagtggcaatggcaattatctagaacaaattggtcgtaacttaacgcaagaggctcgtgatggattattagatccagtcatcggtcgtgataaagaaatccaagaaactgcagaagtcttaagtagacgcactaaaaacaatcctatcctagtcggagaagctggagttggtaaaactgcgattgtcgaaggtttagcgcaagcaatcgttgaagggaacgtacctgcagcaatcaaagataaagaaattatatctatagatatttcatcgcttgaagctggaacgcaatatcgtggcgcctttgaagaaaacatccaaaagttagttgaaggcgttaaatcatcacaaaatgctgtgctcttctttgacgaaattcaccaaatcatcggttccagcgcaacaggaagtgattccggtagtaaagggttatctgatattttaaaaccagcattaagtcgtggtgaaatttcaattataggtgcaacaactcaagatgaatatcgcaataatatcatgaaagacgctgcattaacgcgcagatttaatgaagtgcttgttagtgaaccaagcgctaaagatactgttgaaattttaaaaggtattcgcgaaaaatttgaaacacaccatcaagtcaaattacctgatgacgtattaaaggcatgtgtagacttatccattcaatatattccacaacgcttattacctgacaaagcaatcgatgtattagatattacagctgcacatttatctgcacaaagccctgctattgataaagtcgcgactgaaaaacgtatttctgaattggaacatgataagcgtaaagctgtaagtgctgaagaatataaaaaagcagatgacattcaaaatgtaattaaatctctacaagataaattagaaaacagtaatggtgaacatactgcagtagcaacggtgcacgatatttctgataccattcaacgattaactggtattcctgtatctcaaatggatgccaatgacattgaacgtttaaaaaatatttctagtcgtttaagaagtaaaatcatcggtcaagataaagctgtagaaatggtttctcgtgccattcgtcgtaatcgagctggttttgatgatggcaatcgtccaattggtagcttcctatttgtcggtcctactggtgttggtaaaacagagcttgccaaacagttagccattgatttatttggtaataaagaggcactgattcgacttgatatgagtgaatatagtgatactactgctgtttctaaaatgattggtacaactgctggttatgtcggttatgacgataattcaaatacattaactgaaaaagtacgacgcaatccatattcagtcattctatttgatgaaattgaaaaggctaatccacaaatattaacattattactacaagtgatggatgatggtaatttaacagatggtcaaggtaacgtcatcaactttaaaaacacaatcattatttgtacgtcaaacgctggttttggtaacggtacagaccaagaatacgatgacattatgcaagaaatgaaaaaattcttccgccctgaatttcttaaccgcttcaatggtattgtggaattcttacacctagataaagagtcactacaagaaatcattaatttattgttggatgatgtccaagtaacattagataaaaaaggtattacgatgaatgtctctcaagatgcaaaagattggttaattgaagaaggttatgatgaagacttaggcgcacgcccattaagacgtattgttgaacaacaagtgcgtgacaaaataacagattattatttagatcatacagacgttaaacatgtggatttagatatcgaagacaacgaattagtcatcaaaggtaaatcatgatactttaacatatagcgtatcaaaaaatgagcatcaggacgccctctcctgtgctcatttttaaaattatttcccaggaaaatgattcgctgtgtgttgttctgttccacaacaatcacgatcaatgtcacatgtaccacattttccttgtttcgaacgtttgaaaaatttaactaacgtatacaaggcatatccgaaaattgctaaaaaaattaaaatgttaataatgattgacactttaaccactccttaaacaaataaatgtccgacttgataaaaaatgaatgttaagacatatgcagtgactagaggataggcaactgcaagtgccgtccatttccatgaataagtctctttacggattgctgccactgtagaaacacaaggaatatacaatagtataaatatcataaatgcatacgcagatagcggtgtgaattgattttgaatcacattaacaaggcctgcatcacctgatgaatagataatcgccatcgaacttacgataacttcttttgctaaaaatcctggcactaacgtagcacctgcttgccatgttccaaatccgagcggttgcactaacataccaaagaagctaccaaccatatgtaaaaaactttgattgatattcacattgataccatgtggccctacataacttaatagccaaatgactactgagccgccaaaaataaatgtacctgctttacgaacaaagcccttagccttttcccaagtactacgccacaacgttttaatggaaggcacacggtatgttggcaattccacaataaagattgcattatcattttttaaaaccgtcttagtaagtactgtactgactaaaaatgccataataatacctaaaacatacaagcttaatactactaaagattgattctctttgaaaaagatacctacgaacaacgcatacactggcagtctagcagagcatgacatgaatggtgcaattaatatcgttgttaaacgctctttttcattttcaatactgcgcgcagccataatactcggtacgttacaaccaaatccgataatcatcggtataaaagacttcccgcttaaaccgaacgattccataatacgatccattaaaaccgcaatacgtgccatataacctgaatcttctaataaagatataaagaaaaagagcacaacaatttgtggtacaaagactaatactgatcctacaccagcaataatgccatctgtaattaaatcttgtaaaaatggtataacgccaagataattcataatcgtcttcacactatctgtaaatgtaccacctataaatgcatcgagttgatccgacaaaggtgtgccaatccatgtaaatgtagtttgaaagatcaaccacataatcgctagaaaaataggcatccctatatatttatgtgttaatatcttgtctattctagagctgaaatattgcttatcttcatctggatacgttaccacgtcttgcaataatgtctcaatataatgattgcgtatacgctccatctctcgacgaacagatacagcccctacttgttcagcaacttgataacgtaaactcgacaatttatttacaacctctgaattaagttcgtttgcaatttgcatgttatttaataagaattgaatcgcaataaacctagcttgatacttatcatgagatgtctctgtcattattatttgacacatatttttaattgtctcttcaatcttctcaccataattgattttaaaatgcggtcgatacccttcccctagatgctttatttcgccaagtaaatgtttagttcctttgcctgtacgtgccacaactggaaaaataggtgtttttaactttttcatcaatttatgataatcgatttttatcccgcgctttgtagctacatcgatcatatttaatccgatgtatattggttgattaagttctaacaattgtactgttaattgcatatttctttttagttgactcgaatcaacaatgttaatgattcctgaaaatgaatcgtttaataaatagtctgtcactacagtttcatctttagaaatcggcgataaatcatatgtacctggtaaatcaattaattgtcctacattttcttttagcttccctacttttttctctaccgttacgccactccagttgcctatatattcatacgaaccagttaaagcgttaaacaaagatgttttaccaacattaggatttcctaaaatacaataattttccattcgtccgactcctattcttctaatgcaatagaacaagcatcgcaatgtctaatacttaactgttgtccgtttacttcaataatgcatggccctttaaataaacatttttgtttaatcgttatgatagcgtcatctgttaacccaaaggcacttagacgatacaacatattctcattagcaatatccattcgctttattttataagccttattcatttcaccatttttaatgtttaacatactatttcgctctcctattagaaataataatcattatcacttaaaaatcataacccttaaaattgtagctcgcaatactttatttaaataaatttcatttttcatgtaaaatttgtgacattgcaaaaatattttgtataatcgcttccatgcaaaaaacctccgcttcaaatgtcattgatagacatttaaagcggaggcatgtacatgttattttatgatttatttcttaagtttttttctaacaattgattgagtttttcaatatttttattcaactgttctatattcgttgcttgttgttttgaatttagttgatgcttgttttgataatccattaaagcatcatataagaacaatggattcgtcgtttgctgtttcacttcttggtacaatgccatcgttttatcatctagtactattgaacgtgcatcatcttgcccatgtacatcttgatgtttcgatacatttgttgcaccttgtggatatactttaaaggttgtgtcgtatgtttccttactatctttagcttcagattcctgtgattcaaccgttttatatttttcaagtgcatgtccttcaatatcaactcgtggaataatacgattcaaccatgctggtaaataccacgaaccttttccaaacaatttagttaatgcaggaattaacatcattctgactacgaaggcatcaaagagtacaccaaacgctaatgccatacccattgatttaatcatgacatcttcttggaatacaaacgcaaagaagacactaaacatgattaatgcagctgctacaataacaggaccactttctttcaatcctactttgatagaataatcattatcccctgttttactatattcttcatgaattcgcgacataaggaagacttcgtaatccattgctaagccgaatagtataccaattgtaataaccggcaagaaggctagcattggtcctgtcgtttctatgccgaataatcctttcataaagccatcttgcattacaaaggttgtaaaacctagtgttgccattaatgacaagacgaatcctaaaactgcttttaacggtattagaattgaacgaaagacaatcattaataagaaaaatgccaatacaacaattactgttgcaaataaaggtatcgcctcatttaactttttagacatatcaatattaatgacactttgtcctgaaatctccgttttgaacccatatttatcttgtgcatctttatgataatctcgtaaatcatgcactaaatcgtttgtactctctgcattaggcccttgcttaggtatcacgaccatcaaagcgtaatcattatctttactcatttgtggcggagtaacaatatctacatttttcttatctttaatatctttatacacagattgtaaatcttgttgtaatccttgtggatcatcttttttatctttaacgttaatcagcatcggtatttggccattaaatccttcaccgaacttatctgaaataatatcgtaagcctttttctgagtagaatctgctggctttacgccatcatccggaatgcctagacgcatatgactaactggaatagccgctgcaactaatataattaaacctaataatactgctgcaagtgcattaccagtaataaatttagaccacggcgtatcaatatcttttttaaaattagactgcaatttgttcactttaatgcgtttatggaaaatgctaattaacgcaggtaataaagtcagtgcactgaatacagcaaatataacactaattgccgaagcaaaccccatcactgctaagaaatctatgccaactagcgataaaccacatacggcaatcacaactgtcacaccagcgaagatgactgcgctacctgctgttcccactgcaagtccgatacctttaacatagtctgtttcagttttcattacttgtcgatatctaaacaaaataaataatgcataatcgataccaacagcgagcccaatcattaccgctaaagttaatgtaacattaggtatatcaaagacataggtcaataggctaataatgccaactccagatgctaaaccaatcaatgcacttataattggtaatcctgcagcaatgactgaaccaaatgtaatcaataacactacaaatgcaacaatgataccaactagttcagaattaccgcctacttctgtagaggtcatacctgttcctgttaattcagtctgtacattatgattgtcacgcaaatcttttaaatgacttttaatattatctctagaatcatctttcaaagatgtttgactcacgttatatgtgatatctgcaaatgccgttgttttgtctttactaatttgcttattttcgtatggatctgatactttatcaatgtgcttgtcatcttttttaatatcatctaacgttttcttaatatctttagtgatactcggttgcacaataccatcatctttagtcgtcttaaagaccacacgaatttgtgccttttcactatcttgattaaaatgcttttcaatcttttcattcgtgtctaatgactttaaaccagtcattttaatatcattatcaaatttcggtgcatttgtagcaattggtataaatattgcagctacaataattacccatgcgattaatgtggaccacttatgctttgcgataaatgtacccatcttgtataaaaatttcgccaaatatattgcctccctttaaaatcaacgttatagtttaactatacagtgtagattattgttcgattatagtatctataaccaacctcttaaagaactaatttttgaattctgtattttaaactacatattaaggagaaatgtagatgaaagagaccgatttaagagtgattaagacaaagaaagcattgtcttcaagtttgcttcaattgttagaacaacatctgttccaaacaattaccgtcaaccaaatatgtcataacgcgctcgtacaccgtacaacattttataaacatttttatgataaatatgacttacttgaatatttgttcaatcaattgaccaaagcatattttgcgactgatattagtgatcgccttaaccacccattccaaacgattaacgatacaattaataataaagaagacttacaaaaagtagcagacttccaacaagaagatgcagagtttaataaagttttaaaaaatgtttgcattaaaattatgaatgacgacatcaaaaacaatagcgacagaattgatgtcgatggagatattcctaataatttactattttatatatacggttcattgattgaaggatttttacattggattaaagatgaaaaaattgattggcctagcgaggaaattgataaaattttccataaggtaataaatattaagattaaatagtagattagaggctcataagcgttaccaacattcataataaaaacgatagtttacacattaatgaattcgtgtactactatcgttttttatttttatcgtgcttatcgctattaaaataactgatacacaacacataaactatgaagaaaaaaataaatccgctatctaaatgactttgactcagttgtttaaatgaccaaattactaatacaattcccattattattgaaataacgtatctcacattcttatacctataatccttttctaaaaatatggttgctattacttaatttttaaagttataaataaaaagagccaaccgcaatggatggcccttgttcattatgaagcattagaacatttctgaaacaaccttttgttctaagaagtgtaataagtagtctgggctacctgttttagcgtccgtacctgacattttgaaaccaccaaatggatggtatccaacaactgctgatgtacagcctctgttaaggtataaattacctacatcaaattcgtttaccgctttaatccaatgctctcgattatttgtaatcactgcaccagttaaaccgtaatctgtatcatttgcaacctcaattgcttcatcaaaatcgttaactttcacaaagccaacaactggaccaaaaatttcttcttgcatgattctatctttagatttaagtcctgaaatgattgttggttctacaaagtaaccttttgaatcatcagtgccgccaccttgttctaatttaccttcttctttaccaatctcgatataatttttaatcttatcaaattgttttttattaataaccgggcccatatacgtattgtctacagtattgcccaacgttaattcttttgttagtttgattgacttttctaatacttcgtcataaacgtctttatgcacaattgcacgtgaacatgctgaacatttttgaccagagaaaccaaacgctgacgttacaatagcttctgctgccatatctgtatcaatattttcatcaactacaatggcatctttaccacccatttcagcgataacacgtttcaagaagttttgaccttcttgaacaacggcactacgttcataaattctagtacctgtcgcacgtgatcctgtaaatgtaacgaaatgcgtatctttatgatcaactaagtaatcaccaatttctttcggatcgccaggaacaaagttaactacgccttttggtaatcctgcttcttctaaaatctccattaatttataagcgatataaggtgtatcctcagcaggtttcaataacactgtattacctgcaacaactggtgctaaagtcgtaccagccataatcgcaaacgggaagttccacggtggaattgtaacacctgtaccaattgatttatagaaatatttattgtgttcaccttcacgatcaagtactggcttaccttgagccaagtccatcattgaacgtgcatagtattcaataaaatcaataccttcagctgcatcaccaactgcttcatcccatggcttacctgcttcataaaccataattgctgcaatttccgcttttcgacgacgaataattgccgaaacacgtaacataagctctgcacgatcatttgctgaccatgttttccaagatttataagcttcgtttgctgctttaaatgcatcttcaacatcttgttttgttgcctttgatgcatttgcaatcacttgtgatgtgtctgcaggattgattgatttaattttgtcatctttgaaaatcttctctccattaatcactaatggtatgtcttgacctaattctttttccacgtctttcaatgctttcttaaacatatccacattttcttggactgaaaaatcgtaaccaggttcatttttaaattctactaccatgtacacttaccccctataaattttgaaagtggtttaaccctttgatttaatgatataacatcatttaaactcattttactatgagtaaggtcggttttgcaatcgctttcatttttgtgctttatacctttcttctcaagcattttgaaaatgattagttactttttaaaatttagaagcgtcatgacaactaatttagtgtttcatcgttcaatgcttctgatggtacctcattatcaattttacgaacgactttacaaggatttccaaccgctaaactgtgtggcggaatatcttttgtgacaacactacctgcaccaatcacactaccttctccaatcgtcacccctggtaacacagctacatgtccgccaaaccaagtattactgccaatatgaatgggtccggctttttcaaaaccttcatttctatgatgaaaattaagtggatgtgttgctgtgtagaatccacaattaggtccaataaaaacattatcgccaattgtaatctgtccaccatccataaaataacaattggtatttacaaagacatttttcccaagtttaacgttccatccataatcagtatcaaaaggaattgcgagttcgacattgtccgttgttgtttgaaataattgatcgattaattcctttcttttatttgtgtcactcggtcttgtatgatttaattcaaagcaaatatctttcgctcgtgcacgttcattgattaagtcttgatcaaagtttgcatcgtaccatttttctgctaacattttttctttttcagtcattacacctttcaactcctaataacttatttacttgtttaaaagttaatcaaataaacattcgcctatgcaactaattcgctataacattatgaaatcatgaccttatcacccttatctatacaattctcacatcaaatactgctaaagtagtagataaattcaatactacagacgcattcattttttaatctattaacgtacaatgtgagtaagagaaatataaaggagtatgatagcgatgagaatattaattacaggcacagttgctatcttaatcattctaggtttagttaaaacgatacaagattacgaaatgacaaacgacacgagtcgtcagttgtcagacaacaaagatgatgataaagtcatccatcttaataattttaaaaatttacatgcgaaagaatttaacccatctgatttcttttaagtcacctaagaattgcaaatccagaagtcatttaagttttacctttcattcatacatcctttaatattaattacgacttcttttatatagatgctaaatagagagattgttgtgcaatgtttgcacggcaatctctctttttctttttaaaattggtaaaagtaaaacgcaacgattgacttatatacctatagggggtacattagacgtgtaacaatgaatcacagggaggcaataatgtggctaatacgaaaaaaacaacattagatatcactggtatgacttgtgccgcatgttcaaatcgtatcgaaaagaaactgaataaacttgatgacgttaatgcccaagtgaatttaactacagagaaagcaactgttgagtataaccctgatcaacatgatgtccaagaatttattaatacgattcaacatttaggttacggtgtcgctgtagaaactgtcgaattagacattacaggcatgacttgtgctgcatgctcaagccgtattgaaaaagtgttaaataaaatggacggcgttcaaaatgcaacggtcaatttaacaacagagcaagctaaagttgactattatcctgaagaaacagatgctgataaacttgtcactcgcattcaaaaattaggttatgacgcgtctattaaagataacaataaagatcaaacgtcacgcaaagctgaagcgctacaacataaattgattaagcttatcatatcagcagtattatctttaccgctattaatgttaatgtttgtgcatcttttcaatatgcatataccagcactatttacgaatccatggttccaatttattttagctacacctgtacaatttattattggatggcaattttatgtaggtgcttataaaaacttaagaaatggtggcgccaatatggatgtacttgttgctgttggtacaagtgcagcatatttttacagtatttatgaaatggttcgttggctaaatggctcaacaacgcaaccgcatttatactttgaaacaagcgccgtactacttaccttaatcttattcggtaagtatttagaagctagagcgaagtctcaaacaaccaatgcgcttggcgaattattaagtttacaagctaaagaagcacgcattttaaaagacggtaatgaagttatgattcctctaaatgaggtacatgttggagatacacttatcgttaaaccaggtgaaaagatacctgttgatggcaaaattattaaaggtatgactgccatcgacgaatctatgttaacaggtgaatctatccctgttgaaaagaatgttgatgatactgtaattggttcaacgatgaacaaaaacggtactattactatgacagcaacaaaagttggcggggacactgcgttggcaaatattattaaagttgtcgaagaagctcaaagttctaaagcgccgattcagcgattggcagatattatttctggttatttcgttcctatcgttgttggtatcgcactattaacatttatcgtgtggattactttagttacaccaggtacatttgaacctgcacttgttgcgagtatttccgttctcgtcattgcttgtccatgcgcattaggacttgctacaccaacttctattatggtaggtaccggtcgcgctgctgaaaatggtattttatttaaaggtggcgagtttgttgaacgcacacatcaaattgataccatcgttttagataagacgggtaccattacaaatggtcgtccagtcgtgacagattatcatggtgacgatcaaacgctacaactacttgctactgctgaaaaagattctgaacacccattggcagaagccattgtcaattatgcaaaagaaaagcaattaacattaactgagacgacaacatttaaatcagtacctggtcatggaattgaagcaacgattgatcatcaccatatattggttggtaaccgtaaattaatggctgacaatgatattagcttgcctaagcatatttctgatgatttaacacattatgaacgagatggtaaaactgctatgctcattgctgttaattattcattaactggtatcatcgcagtggcagatactgtaaaagatcatgccaaagatgctataaaacaattgcatgatatgggcattgaagttgccatgttaactggcgataataaaaaaactgctcaagccattgcaaaacaagtaggcatagatactgttattgcagatattttaccagaagaaaaagctgcacaaattgcgaaactacagcaacaaggtaagaaggttgcgatggttggtgacggtgtaaatgatgcacctgcattagttaaagctgatatcggtatcgccattggtacaggtacagaagttgccattgaagcagctgatattactattcttggtggcgacttgatgcttattcctaaagccatttatgcaagtaaagcaaccattcgtaatattcgtcaaaatctattttgggcattcggctataatattgccggtatccctatagctgcattgggcttacttgcgccatgggttgctggtgctgcaatggcactaagttcagtaagtgttgtcacaaacgcacttagattgaaaaagatgcgattagaaccacgccgtaaagatgcctagattcctgaataatgaaggattcgttggtgattctgagataggctagtgattggctctataatgtcgcggtttacagttggatcttcgctccaactgcataagagcctgagacataaatcaatgctctatgctctacaaagttataatggcagtagttgactgaacgaaaatgcgcttgtaacaagcttttttcaattctagtcaactttgccggggtgggacgacgaaataaattttacgaaaatatcatttctgtcccactccctaaaaggaggtgaatgctatgtcacaagaaattttaaatgttgaaggtatgagctgtggtcactgcaaaagtgctgttgaatctgcattaaataatattgacggtgtcacttcagctgaagttaaccttgaaaatggtcaagtaagtgttcaatatgatgacagtaaagttgctgtatctcaaatgaaagacacaattgaagatcaaggttacgatgtcgtttaattaggcaatattcaacgtcatcaacaccaaattaaaaaatcgaactgatgagaatcccaacaatccaaattatctcatcagttcgatttttaatttactcgtaacctagtatctccagtctgcaatacatctaatgttgcatctaatgcatcgacaattagattttcaactgcagcttcagtataaaacgcaatatgtggtgttaatatgacatcttccctgtcaatcaacgattctaacaatggatcgttcagtgttttgcccctttgatcacttgggaaaagtttgcgttcaaattcatacgtatcaagtgctgcacctttaatcacaccattgtctaatgcgtctaataacgccttagtatctaccaaagaacctctcgcacaattgacaaatactgcgccctttttaaaatgtttaaataattcagcattaaatagataatgattatatttcgttgcaggtacatgtaatgtcacgatatcagcaccttcaaccgcttcctcaatcgtatctttgtaatcgacatacgttgcaattttagcattaggaaacgggtcatatgcgaccacatcactttgataaccattggcaaatatatcggctactacacggccaattcgacctgtaccaataacagctacttttaaatctttaatggatttcgataaaatagtaggttcccatctaaaatcatgctctcggactttcgtttgaatttgattaaaatgacgaaccacattaatagcctggttcacagcaaactccgcaattgaattcggagagtatgacggcacatttgacacaatcaagttatacttgtttgctaactccaaatcatatgtatcaaatccagcactacgttgtgcgatttgtttaatacctagttcatttaatcgtttataaacatgccctgataatggtatttgttgtgatagcgataagccatcataaccagcgacaccttcaacattgtcatcagttaatgcttctttagtaatatctacctcaacatgatgtttctctgcccacgccttgatataaggcatatcttcatcacgtacactcatgattttaatttttgtcattttaacatcacccttaactttattatttatataaatatgctaattctgctaatcttattgcagcttcgtctaattgctggtcatctaacgccaatgagattctcacataacgattaccattctctccaaatggtttccctggagcaacaagtattgacttctctttcactaaaaattgctcaaattgctcgctgtcataaccaggcggtgtttccaaccatacatatataccacctttagcatgaacaaatggcaaatcagcttttgcaagcatggcttcgaatcggtcacgtcgtgctttaaatacattgctttgttcttctaaaaaatcatcataatgattcaaagcatatattgcggcatcttgtaatgcaccaaacatcccagcatttgtgtgcgtttggtactttttcaaagcttgaatcatatctttattaccaactgcaaaaccgactctaaaacctgacatgttataacctttagacaaggaataaatttcaatcgcaacatctttcccattttccgaagcaagtatactaggatttttagcgtcgaaaccgaaagcaccataagcaaaatcatgcacgattttagtgtctgtatctttaaatttagctatcgcttcatcaaaaacttctttcgtagctgtcgatccagttggattatttggatacgttaaataaatgagttttgttttatctattatttgtgaatcaactttggaccaatctggcaaataatgcggcggttctaaattaagcggaacaggcttgccatcagctaaaagtacacctgctaaataatcagtgtagcctgggtcaggtagtaatacatagtctcctggattgataacacatgttggtactgccactaatccattttttgtaccatataaaatacatacttcatcttctttatctaacgtcacatcatattgtctttgataaaaatctacaatggcttgcttgaacatctctttaccatgaaaagcaccatatttttgattttcaggaatagttagtgctttttgaaaatgatcaataataccttgtggcgtgggcccatcagggattccaactgccatattaattaatggcaatggtccatgttcgattttacgtcccatcgttttcccgaaataactatcagggatatttgctaatttgttagagatcatcaaattcctcctctatcattaaacatagcctgggcgactatcataatcctaacaacttgtatcactctcatttagatggttacaatgacatcgccattcaccgttatgttcaacagaacttatgacacacgttgtattgaatgaatttattttcattttaggtaggtacaatattattgtcaatattaggaattttcagattaatatacactcaatcgttatgattcaactgccatgcatatccgcatgcgcaaccagttagatatgcttatataaagtataacgcccatcaaggtacgtattcaaacgtgaaccttaacaggcgtcattcattgttaaataaaacttcttaagcacatacttatttcactatgccttttacgttccccttatacttttctcacatctttctcttagactactcccttacacgccttgctcaatatctttaaccatttcgtctacagttattttcgcactcgttaagacaataggaacgcctgcacctggatgcgtacttgcacctgcaaaatataaatctttataatctcgcgatacattttgtggacgataataattactttgcgctaaagttggcattaaaccgaatgccgaaccaaatttcgcatgatacgtttgttcaaaatcatttggcgtaaagattgtttctgaaacaatatgcgattttatatcttcaaatacttcaattgttgctaatttacgataaataatttcctttatttgttgcgtcaaagcttcatctgaccaatcgattccgctacctgttttaagttccggagtcggcattaacacataaataccagttttgccttctggcgcaagtgatttatcagcgaccgctggaacatacacataaatagaaggatcatatgataaacgtccctcaaatatttcttcaatattgcctctaaaatcatctgaaaaaataacattatgaagtctcacttgatctgtcacatcaatatctataccgatatacattaaaaatgctgaacaagagtaatctaagtctgcaattttatgtggtggatactttttaataggtgcaaaatctggcattaatgattccgcaacactagggaaatcagccgtacataaaattttatcaaattttcttatgtcaccattcacttttatcgcatcagctcgtttgaatttaggatcaataataatttgctcaatttcagcattaagttcaatattaacgcctaaatctttatttaattgcgctagcccttgagccatgccatacataccgcctttaataaaatgcacaccaaacatcatttcaatcataggaataattgaatatagtgacgggcctcgttttggatcaattcctatgtataacgtttgaaacgctaaaagcttttgtatcttttcgttatcaatataatgttcaattagctgatctgcatgatttaacgtttttaacttagcaccttgcacaagtgacgtcatattataaaagtcacttggtttgcgatacgttctttctaagaaatagcgacgtgcaatttcatattttttataaacatctgttaaaaaggacataaaaccatgcgttgaaccaggttctatactttctagcatgtgctgtaattcagctaaatctgtaggcaccgttatacgatcatcgcggtcaaaatacacatcgtaaatataacgtaattgtctcaattcaatataatcttcataatttttaccacacattgtaaatacatctttataaacatctggcatcataacaattgtggggcccatatcaaatgtaaagccgtctttctttaattgattcatacgcccgcctacgttagtatttttttcaaatatcgtcacttcatgaccttgagaagcaatacgggctgccgctgctaatcctgtgacacctgcaccaattactgcaatcttcattattcaaccacctatattctatgatatttactatttatttcatgaaacaactttgcttttttccgcttatccacaaaaacacgttcatgtaatgtatagttagcctgtctcacttcgtccagtatttcaatatatatacgtgctgctaattctatgattggttgtgcttcaatactaaatactttgatttgatccataacatctcgaaaatctttttctgcgatagctgcataatattcccataagtcaatataatgattattaacaccattttggtacacttcagcaatatcaacttcatattgctttaatcgttgcttactaaaatatatccgttcattttcaaaatcttcaccgacatctcttaatatattaatcaattgcaacgattcaccaagccttcttgcgacatcgtatgtctgatgtgtttcatgatcacttaaaatcggcgtcaatacttcacctactgtaccagcaacaccataacaatatccgaataattcagcgtccgtttcaaacattgtaaattgttgatctttatatacagtatcaatgagattatagaaagattgaaaggcgatatttttatgttgtgcaacatgctgaagagccatcatgattctacgatcactttgaaagtgatgatgttcatatgggtatttttcaatagattgtatatcttcttttatttgatttaaaaattgaatatcgccataaacatctatactgtcatcaattttacgacacacagcataaattgcccaaaccgcttttctttgatcttctggtaacaagtcaaaagcgtaagaaaagctttttgaatgtttcttcatgattttatgacaatatttaaaattcatagccatcattgtcatactagtcctcctatattgaaatgccattaccttgatttattgttctttagatatagaatattgacgacctttccattcaactacaccataacgatgcgtttgtttccaagattggatgaaaattttagtgaaaaacataaataacaatggatgacataccattaataaattagaaaattggccgacccttcgatgcagatgaataaattgtgtagtatagctcaagtaaactgttaacatttttcctacagacatttggcgatattttaaactaagacatagccctaaaatactcgcgatagaaccgaacaaccacaacacaattgctgtcatgatcttaggctttgtgccacctgccccagttgacaaatgctttgtccatccttcttgtaatgactgaaatccttcttgatacatgcgaaatgcaacaaatggaaatccttcataaactgttacgggcaatgattgtgaagtatatgcacttcctaaagcaaatccttcaataatatgacggttcgcacttttatgacctccagttgcataataatcttctttatttgttaatgtcaccggtccaaatgcatgctggttagtccgaccgtcgtctaaggtagaaaatacattcataccaacgactgtcattaaattaaatatcgctgaaaacccttcgtagaaacgctttgttatatgataaggctgtacgcttaacaatcctttttcaccttgtaattgatactgattaatcaacgtttcaacagcatctttccttaagaaagttacatcagcatctacaaaagcaatacgattcgtacatgcatgcgtcacaccttgataacaagcatgtgatttcccataccatttgccgtcagcatcatcaacaacatctactacagtcgcaccatatgaacgcgctacacgtgctgtttcatctgtcgatccgtcattcataacaatgacatctactggaacttgctgttgtattatcgaatgtagtaaatgacctattcttttttcttcgtttctagccggaataataattgttaatgctttatgattgaagttcagcgttttcgcctttagctgatgtctacgattaaatatcaatgcaccacacgccatagacatggtcactattactgttaatattcgtgataaccatttcatagatatcacttcctattcttcgcttctcgcgcgtttattttgtctgcgacttgttgcccacttaatgtaaccattggcatgccaccaccaggatttactgatccacctacaaagtacaagttttcaaaatactgactttctttaggaaatttaaatcctttgtttttctttttatctgctacaacaccatatattgcaccacgattagaacgataatttttttcaatatcctccggtgtccaaacatcttcataaataatgtgttttcttaaatcagtgagtcccattttttctaatttatccaaaattttatccctaaacttcgcataatcttcagttgtaaaaggctgatcttgaatatatggaatatgtggtaagactttgatattttcataacctactggcgcttgtgtgtgatcagttttattcgtatttactagataaatggtcggatcatctggcaataccttttcatgaaaaacttgttgataattgagataagcattttccgtaaaaaagaaattatgatgtgctaattgcgggtattggcaagcaacacctaaatgcatcacatatcctgagcttgctggctcaaattcccgctctaatttgtttaatcgttgagtaccaaggtgaagtaaatatttataagtaggtatgacttccatatttgaaataatataatctgcctttacaaactcacctgtatctaatctgacacccgtcacacgtctttgatatgttttaatattgtccacacgtgtacctgtatgaattgtgacaccttcttcacgcgctagcttttccaaggcattggctaaatgatggattccagcttctacataccaaaggccttgctcttgttgcatatggaataacatagataatactgctggcgcatcgtatgatgaagaacctacatatttgataaaatagcctaacatttgtcgcaagaatggattcgagatacgcttgtctatggcctgttgcatagtatgtacataatcataattaataagtgcatttaatggtccatgaaatttaataatttgagatagtgtatctaaaccatagttaaaataccctttttcagtaatacgatcgattcgtcttgtataattcaaataattttgcagttcctctatatccttgttcgacaatatcgcattatgctgacctgtttctttaataccttcatacaaatcgatagtcgttccatctggaaaaaagctacgccattgatgtggcaatctcttgattgtaacgtagtctgacatttgcttcttgctatattcgaataatttttcaaaaatataaggcatcgttaaaatagatggacctaaatcaaagccaaagccatctgattcatgacgattcactttgcctcctatatgattattttgttcatataatgagaccgaatagccactttgtgccattcgaattgctgcagaaatcccacctaagccaccaccaataacgatgatatgtttagtcatgacgttcacctcttcgttttaatatgcgtagtaactgcgttaatctcggtcgattataacgttgcacaataatgattggaacattagctatcattgcatagaaaacatttatatactttactaaacgaggtcctttaatgaatatgatgactggaagtatcgatatccaatggatcaactctgccctctttgtctctataatcattttttcaatttcatcagtattgattgtcattaaatgacgctgatcatatatatttcgattaagcttatgaccatctaaaatcttatgcttccattttcttacgtaaaaccatttgttccaaaattttccatgcttctcaaagttaaatgatttaaatattatatgcttctgacgaaaatacttgtcaggaattcttgtacctaaatttgctatatttagttgaacaattaaccaatacatactacagaaaaatgctgttttgatatattttttcatggttttcatctaaattgaatcactctcaatcatactgacatagtataaattatcattttattacttagttccctaaagatcagtgaataaaccgctctcatttatatttatataaaacaaaaacgccaatactctcacgttagagaatattgacgtcatttgatttacctttgattaatgaatgaaattatatgaacctgcttggtttgctgaaattgtacgagatgtaaccacaccagcaccatgtccatagttcatttctgaaacacgaacagaaccgttgctgttaacgccttcaacgtaagcaacatgaccgtaatagccttgtgttgtttgcatgatagcgccagcttttggtgtattgttcactgtatagccagatgatgcagctgcgctagcccaattactagcattgccccatgttgaaccaattttcccaccaacacgatcaaatacataataagtacattgtcctgaagtatataagttacttcctgatgcataaccattagaaattgaacgaccatttgaagatggagctgcagttgtagtcacatgaacattattgcttgttgtgctataacttgcacctaaaccaccagtgtaatagttatttgttgctgtttggctattgtttgtatagttattgtattgatatgaatgattatagtagttattgtaagatgcattgttataactataagtattgtagttattgtaatagtatgtgttgttttgcgttaattgacttggattccaatttcctgtccaagtgtaatgataattaccttgtgcatcaattgtatacgtatagctgtatgattgagcgtcattagaattatatccattgttattttgttctgcggcttgtgcatcatgtcctgcaaatgcgatagtggcaagtcctgctgtagcgattgtagctgtaacgatttttttcataattaaatatcctcccaataatcaaaacactctatacatatagtcattagcgactcaattattttaaattttatattttttatcttttttattatgcaaataattataacttttatagttttgcgacaaaacaaactataacagatattaggtaccttgtggtctttgttatcataatgtaatctgttcctaacaaagcatcattgaatgtaatataccaattagaatgttcacaacactttttctgcactgttaacatgggatttgaaaataaaaaagcactaaacttttaatgaaatacatcctttttgataataaatatcagaagtaatgtaatatttcaaaagtttagtgcatcaagttatttcttatttgtagcatgtgtttccatcgtttttacaatcaaatcagtcaatgctttactacctgcatattctaaatgtatgccgtcataagcaaagtactctggatgacctgcagaagctttataccaatcgactagatgtacattaggacgcttttcagctgcttcgtatattaatttatttattctaccttcataatttctaggtactctaatagaaactaaatatatgtctgcttttccaaaactatccaataattcatttaattgatctttcgtaaatgccccatttgtaccaagctctactacaactttttgaccttttttagcatagtctttatattgcgatttcacaattggtgtagcatcaacgagttgccgtccaactttaccatcaatttgtgcatttggtattttcttagtaaagacattaccaatatccaccataaccgagtcaccaattaatagtggtgatgactttttaatatcctctttactattcgccgtctgcttatcctcttgcttatcttttttaacgacctttttcttcgttgttttaaattccgtcttcttctctttcttctcagcttcatgttgtttaccaagcgcatcaaattgcccactgagcacgatgatagatggaatcaataataagataactaacacagttctagcaaattgactcttctttttaggtaaaaatgcaaaagctttaaatccttttttacgtataggggtttcaataaagcgatacgaaatttcagccattaacgctgttaacaaaatttctataatataaacgtataccggtatttgtccttgtacgtaataactgttcacaaaaacaatgataggataatgccataaatataagctatatgatcgtttacctataattagcaaaggtttcatacttaaaaatttagcaaataaactagaaggatgtaccgcaatcgcaataatgaataaagttgcaaatgatataatgtaaaatcctccattatatatccattgatcttggtctccaactataaagaacaaagtcattagcaccgcaaaaccagatatccctataatatctaatgatacgacaatctttttagaaatatcttttttcaaagcaaacggtggccaaataaatgctaatatacaaccaagcaataaagtttgcagtcgtgtatctgtcccaaaatacacacgtgaattatctccagtgataaaatgaatcgctatcataagtcctaaagaaatcaacgatacaataaatagcgtttgaataatatttctcggtttaaatctatgtaataagaacgtgataaccaatgggaaaagcaagtaaaattgttcttcaatggctaaagaccataaatgtttgagtggttcaatagcaaattggttaaaataatctacattctgtgaaatgtaccaccagtttgaaacatagaatatagctgcaatagcatctcgtttcaattgtataatcaattccggtttaaatatcagtgtgaacgtaagcacgacacagattaaaaataacactgccggaatgagtcgtttcaatcgtcgcttccaaaactctagcaaatcgattttttgcgtccgataatactcacttatcaacaaacttgttattaaataacctgaaataacgaagaatgtatctactcctaaaaagcccccacttaaccattgtgcattcaagtgataaataatgattcctataactgcgaatgccctcaatccatctaatccgggtaagtatcgcggggaatacattttttctaaacgtttaaagtcttttgtatccatgttaataaacgccccatttatttttctctattttgtagcatatcacaatatttttgaaaataaaatattgcactgattttcattaattgatttaacccttaattaagatagttttaaattttttattaagtagaaaacaattattacagttaatttcattactgcaaaccacatataaatttgtcgattttactacataacatagattatcatagattcttgaatttttaacaaaataactgttattttcattatatttttacaaaaaaaggttcgttttatattttatgcatcttactgtaacagaatcattaagatatgctgttcggaatttacttttaaaaagttgaataaactgataaattaccgcgcactgttattaaaatatatacacggtgatatctttccaactcattttcaaatttaaccatatgaaatgacaaataatcactccttattgaagtgtttgtgtaaaaagaatcatggtgtattgtttatttcaccttattctaatttaatagtgacattaattcttctatcatgacattaaaatcatcaggaataataaaataacatcctaaggctctagaatcatactttaatttctaataaaaaaactcttcccaatttctatgggaagagctatatatttaatgtctaaacattacttttattaattatgaaggaattagaatccccaagcgcttaaaccttgtgctttgtatgctttaacagctgcgttgatttgttggtcaacagtgtttgttggaccccaacctggcatagtttggaataaacctgaagcacctgatgggttgtaagcatttacttgaccatttgattcacgagcgatgattgcagcccatgtagaagctgaaacaccagtacgttgagccatgatttgagctgctgatgaaccagtagcacctgcagtattaccattgcttaatctcactgaacttgaagtagttgaagtgctgtagttatggtaagttggagctgaaacagcttcaacgtttgagttacttgattgtgcattgtagcttactgattgtacatttgaaccttggttgtatgaagtagtgtagtctgcacctgcaacgtttgagaaaccagcagtttgaccattagctgcttcatagctccatgaccatgtagtaccatttgaagtgaagttatattggaaaccatcttttacaaagtggatgtcatatgcaccatctttgattggagctgcatttaattgatcttggtgattgtgtgctaagtcaactaagtgtgcttgatcaacgttcatttcagcagcgtgtgcttcatgtcctgtgcttgctgcgtaacctgttacacctaatgccactgctaatgatgatgccataattgtctttttcatagtaaaaaatcctccagtaataattgtaagtttatgtttttagtaattatattttgaatttgaaatgtcgtagtgcaagtttaaattgtcttttatttctttcaacggtaatcactatatcacaaaaaaccagccagtaaattacactttctttacaaaacattacaatatcaagttttatttgtaatgttgaaatatggctgttttatactgtaatgtgaaatatgtaccttttagaatccaataaacccttgaaatagtctttaacacataagatttttactatgtttagctcaactattacaactttcgtaatattacagattgtatttttgttacatatctgtaatatatctgacatgtaacttctcttattttcgtacattaaacgcaattaaaaagcaatcaacacatatggttctgcaaatgtgttgattgctattattgttatatattcaaagttactatgcacacatcttttgtgaattgtcttatcttttataagcacaaataaactacagctcaattatattgttaaactttattctctcaattcacaataacattaaataatttttggtctcatattttcaaaaaacatactgtccttatcccatgaatttaaaaatatcattagtatataaacgaaacactttacgataaatgatatctgcaagccaagctgttacaaatggtacaacaaagaacgctactacaattagtaagacactcaaccaagcagaatcaacctccataaatttaaatgcattaatcggtcctaccatccctataaaaccaaatccagctgactctttcgttccatgaatacctactaatgctgataccaaacctgatacaatggctgtcgtcaatattggtaacataagaattggatatttcaccatattaggtatcatcattttaacgcctccaaagaagacggataacggcacccctaaacgattcactttacttgtaccaattatcaatacagcttcagtcgcggaaataccaattgacgctgacccagctgctaaacctgtaatacctatcgcaaaggcaatggccacagttgatagtggagaaataataataagactaaataccattgaaatcaaaatactcatgacaatcggttgtaattctgtaaaaccattaaccatattaccgatggctgttgtaatcattttcgtatacggcaatattaaaacaccaattgcacctgaaataccgccaacaactgttgggaatacaatcaatgccatactacctacgcgatgttgaataagtaaaatgaacaacactgcaatcgctgctgtaatcattgtattaattaaatcaccaatacccgtaatcatccaagcaccatttttaaactgcgctgcaccgcttcctacatatgctgcacttgccacaacagcaattgctaatggcgataagtcaaatttcatggcaaccaatgcaccaatcaaagcaggtactgtaaattgaattgcaacgacaacgcctaataacgttttaaaaatcggatgataatccataaagtatttaaaaatttctccaagtatcgcattaggaactaaacccgcaacaatacctatggcgacacctgataaaactctaaatataaaatctttgggtgtaattgttttaattgatgtcataatatcatccttccatttatgtatatacatctttatgcaaataataaagagccttaagttataagctgccactagcttaaattctaagatgtgcatgccgatgttgttatatttaggctagcagtatcatctataactcaagactatgaaaaatagtatatcacaaaattctgaatttttagataaagaaattggcaatttttcaaacatattgttacaatacacttttattttatcttcatttttaaaatccattaatataatagaagaaagacattcaaatgcttaccaaaaaggtacattatttgctaggagtgtatcagcacttacatatcatcaacacctacacacaatcaacaccattgacaacataatagaagatactgataataagtgttaaaacaacagatgttaggtagtgaacaaatgatggaaagtaaatccatagatccaagaatcgttagaaccaaacaattgcttgtagatgcttttcttaaaatttctagagaaaagaaattatctcaaattacagttaaagatatcactgatattgctacgctaaatcgtgcaacattttacgctcatttcactgataaagaagacctcctagactacacattgtctgtaaccattttaaaagacttgaatgataacttgagcatttctaatgtcattaatgaaaaggtactacgtaatattttcatttcaattgcgagttatatcaaagatgctgcaaagtcttgcgaattaaatagtgaagcattttgcaacaaagcacatcaacgtattaataatgaattagaagatatttttgcgattatgttagaaaacagctacccagagcatcaacgagatatcattgtaaatagtgcgagttttttagcagctggtatatcaggcttagcattacattggtttaacacgagtcaagagacagccgatgtgtttatcgatcgcaaccttccatttttaattcatcatatagcacatttttaataaaacttggtatttagtcatgcatcttgaaatcactatgtgacttaggttcatacttgtacacacaataaaatttaacgtattacgattgattagccgtgtctaggacataaatcaacgtcttatactctacaatcccatattggcagtcgttaactgaatgaaaataagcttgtcattaaaacatatagattttagtgacaagcatttttgtttttgcgtacttaaacaacacttcaggcaatatgttgtttaggcaacaaatgatatgtgcgtgtttattggcaagcgtacgacatagtagtatagtatgtctaagcaacacatgtcgcatagttgatatgcgttgtttaaatcctaagataggagggattgacgtgagcgagacagatgaacctcaggggtttgaacacacgcataacatattaaatattaatcagaatagtcagagtctaatgacattcattaaaagtaaattgaagtcgaagttgaagcaacacataataattgctcgtggtaaaaagcgaatcgactatcgactgtcgtataacttttacactacgtattatgataatgtagaaatcaagaaaatcgactgtgaatatacctatgctatgcccattgcaattttaataagacacatgatgtcattcgacaatgctcatttctttgctcagctacgtcatcctgtcttataaaacaacattgcagacatgtatatcaaacgacacttcaataacatcactttgtcatcgtactactattaaaatcgtgtctcaaaccccttattttaattccaaaaatctgctggtcaaaagaccgagaaactaaaaacattactgaatgtgttgataaattaccttatagaaatgatctcaaaatatatcaacacttgattctaaggaggatacgacaatatgaaaattttagatagaattaatgaacttgcaaataaagaaaaagtacaaccacttactgtagctgaaaaacaagaacaacatgcattgcgtcaagactacttaagcatgatccgaggtcaagtattaacaacattttccacaataaaagtggttgatccaatcggtcaagatgtcacaccagataaagtttatgatcttcgccaacaatacggttatattcaaaattaatatttgctcacgaggtattgcacttaaggtgccaactgacctcataaacaaagcccatactgattgaagacactaatgtatcgcaccacgtctcttacgacatgtgcaagttggggtgggacgacgaaataaattttgcggaaatatcatttctgtcccactcccacattacgctccatctctgtatgggctttttatttattcttttgagaatttcattttagcagaccaaaaaattaaaatggtgtccatcaagatctttgaacattgcaccataaaacccttggcttactgttggttcttgaacgactgtgccacccgcttctttcactttattcagcaactggtcaacttcttcatttgtgttcacacctagagaaatcatcacttcatttggttcagtgttaaggctttgctgacttacattttgaaaatgcttgttttctattaaaattacggttgtttgacctatttgaatgccgaccattttatctaacatttgtgggtttctatttattttaaatcctaacgctttataaaactgtgcgctcttttctaaatcttgcacatgcaaattaaaccacattgattgaatcatgattgcaccccattcattacttattatagtcttggactttaagccaatcacttaatgataatcttgttggatttatttcagccattaattcaaagtctacttcataacctttttcttccaaccattgcttttctgcaacaccactaacaaattctccttctataacagtcgatttacctgtcacttcactaaaaattgttgctacttcacttaatgtaacttcatcggaaccaatctctattgattgatgcgtaaagctttgtggatgtgcaaaaatatacgatgcaattttagctatatcaatagaagaaatcattgtgaattttatattcggattaataaattctggtaatgtaatacgttcatcttcgactttagcaatgcgtaaaaaattatccataaagaatgatggtttgataattgttgcatttatattagattccattaatctattttctatttttgctagtacttcaaagtgtgggccagttcgatttcgattaacccctcccgcagtactatacacgatatgttgaatattttcttgctcagctatttcaattatcttcataccttgtcttaattcttcgttaacatcatctttaacgattggctgaatactgtataagccatacttccctttcatcgctgattgcaaactaacattatcactcagatcaccttcaacgattgataaatgcggatgtcctatgtctgaaagtttacggttattcttatttctagttaatgcacttacataccatccatcctctaacaactgttttacaactgcattaccttgcttccctgttgcgcctattactaaaatatctttcattttagatccactcctctttttatcttaaaaaccaatagtcctctttttcaccttttaaatacgtatatggttctggtgtttgtccatttcctttaatattgtcgtttattacatctctgacatcccatactaaatgaataaatcgttgtaattgatgactaaaaatgcctagtggcgctttcatagctaacactttttccacatcttctgtagtgacattcagtttttcagcaatcatttgaaccgataaggtagattcttcaaaatgtgcttgcaattcttcagctgtaatacgtctttgctctttatttaaagacatacgcaacactcttttcttttatgatatttaatagttattgcaaattcattgctatctttcttaacacgctttataataaacggagagttatccgtttgtcaattttagagaactataagtaggtggaacaatgcgaaaggatgccatagagaataggcaacgaattgaagaaatagcacacaaactttttgatgaagaaggcgttgaaaacattagtatgaatcgtattgctaaagaactaggtatcggtatggggacactatatcgacattttaaagataaaagcgatttatgcttctacgtcatacaaagagatcttaatacttttataactcgatttaaacaaattaaggatgactatcattctaattatgaggttatgaaagtatctttagattatcttttacaatttaaaatcgataataaaacacttcttcattgtattgaagctggcaacaataaattacgtttttaccaaagcgcattttatcaagaattatttgatttttattacgatttatttaaaagcgatgatgacattttcacaaagttcaaaactgatatgctgttacaatcattatcaactagtgtatttgccttccaaatagaacatcgccatatttcaattgaagcgtacagaaattatttattaaacatttatttagatgaggtggaacgtaatgactaaaattgtgttaatcacaggaggcaataaagggttaggctatgcaagtgcagaggcacttaaagcattgggttacaaagtttatataggttctcgtaatgacgtaagaggacaacaagcatcacaaaaattaggtgttcattatgtacagttagatgttacaagtgactactctgtcaaaaatgcttataacatgattgctgaaaaagaaggtcgtcttgatatcctcattaacaatgcaggtatatctggtcaattttcaacaccttccaaattgacacctcgtgacgttgaagaagtatatcaaacgaatgtattcggtatcgttcgaatgatgaacacattcgtccctctcttagaaaaatctgaacaacctgttgtcgtcaacgtatcaagtggtttaggttcatttggaatggttacaaaccccgaaacagctgaatctaaagtgaattcattagcttattgttcgtctaaatcggcagtaacaatgctaacattacaatacgctaaaggattaccaaacatgcaaatcaatgctgctgatccaggtgctacaaacactgatttagttggtgattttagtaataattccaaacacgtttctgaaggaatcaagccaatcattcaattagcaacgattggtgcagatggcccaacaggtacatttattaatggcgatggagaaatgccttggtagatcaattttatgttacaaacattgaaattagaggtatataaaaaatgcttctgcaatagatgcaataaacatgcaatacaatatggaggcgaattaaatgaaaagtattacgtttgaagaacattatgtcattgaagatattcaaaaagaaacgatgaatgcgatatcagcagatcctaaaggtgtaccgatgaaagtaatgttagaaggccttgaaaaaaagacaggttttacaaatgccgacgaattatcacatcatgatgaacgtatccaatttatgaataatcaagacgttcaaattcaagtcttatcttatggaaatgggtctccctcaaatttagttggtcagaaagccattgaattatgtcaaaaagcaaatgatcaattggcaaactatattgcacaatatcccaatcgctttgtaggctttgcaactttacctatcaatgagcctgaagccgcagcgcgagaattcgaacgttgcatcaatgatttaagattcaaaggtgcgctcattatgggacgtacacaagatggttttcttgatcaagacaaatatgacattattttcaaaacagctgaaaatttaggcgtaccaatttatctacatcccgcaccagttaacagtgacatttatcaatcatactacaaaggaaattatcctgaagtaaccgcggcaacatttgcttgttttggttatggttggcacattgatgtcggaattcatgcaatacatctagtattatctggcatttttgatcgttatccaaagttaaatatgattataggacattggggtgagtttatcccattcttcttagaacgtatggatgaagctttattcgctgaacatttgaaccaccctgtaagctattactttaaaaataatttttatatcacaccaagtggcatgttaacgaagccacagtttgatttagtcaagaaagaagtaggtattgatagaattctttatgctgctgattatccatatattgagcctgaaaaattaggcgtatttttagatgaactgggtttaacagatgaagaaaaagagaaaataagttatacaaatggtgctaaattattaggtttatcatctaacaattaacaaatggaggtcattgaatatggaaactttagaattacaaggcgctaaattacgataccaccaagtcggacaaggacccgtgctcatctttattcctggtgcaaacggtaccggagacatttttctgcctcttgcagaacagttaaaagaccattttactgttgtagccgttgatcgtcgtgattatggagaaagcgagttaactgaaccactccctgattccgcttctaaccctgacagtgattatcgtgtcaaacgcgacgcacaggacattgccgaacttgcaaagtcattaagtgatgaacctgtctatatattaggttcaagttcaggttcaatcgttgcgatgcatgtgttaaaagattaccctgaagtcgttaaaaagattgcatttcatgaaccaccaattaatacatttttaccagacagtacttattggaaagataaaaatgatgacattgtgcatcaaattttaacagaaggcttagaaaaaggcatgaaaacatttggtgaaacattaaatatcgcaccaattgatgcaaaaatgatgtctcaacctgctgatactgaagaaggacgtatagaacagtacaaacgtacgatgttctggtcagaatttgaaattagacaatatacgcattcagatattactttggatgatttcacaaaatacagcgataaaatcaccctactaaatgggacagattctagaggatccttcccacaagatgtcaacttttatataaacaaagaaactgacatacctattgtagatattccaggcggtcacttaggttatattcaaaaacctgaaggctttgctgacgtattattaaatatgtggggttaatctatcgttctctaataaaacagcttggacagttttcaaattatatttgatggctgaccaagctttttttgtttacgtttaaacgttcaaatcaactcgttattatacatgaaggcatgttaaccattctcttccactgaaaacactactgttccaaacattgatagtcttcttttgaaataccctttccgataagcaccaaatattctggcactttttttgaaaatgctacaggtgttaattcatattgtccttgtgtaaattgaatgagatacgtatgtgtagtgtctttaaatgtcataaaccctttcaacctataaatatgagacggaaggcatgctaaacgttttataaactgtgcttttgtacatttgactggtgattgcacaaattgatgattaatcatttgatgtaacgacttatgtttattgtcagaagttgctgtcatttgtctaactgatattggcaaagtgacgctgccatgcataccaacttgtatatcggcctctgggttaataacttctaaatctttcaatagtttgctcgtcgtttcaacatctgctgaatctattttattaacaaataagacagaacaatatgctaattgctcataaaataagccttggatgtctttagggaatgatttaatgtgtttatacatgcttgcgtctattacaccaatcatatgtgtaattgttgtaaacggagctaaaataggcgttaaacaagcatctaagacagagaccggttctgcaatcccactacattcaataaatacaatgtctggttgctcttttaaatataattgatgtaactgttctgatacatctgctttcattgcacaacagatacacccctctgtcagttcacttaaaggtatgtcttcagatactaaggcaccatcaacactcattttgccaaattcattcatgatgactgccggtttcagcgactcctttaatgattcagcgagcaaatgatttaagacagtcgttttaccgccacctaaaaacccacctataataactattttcatctgcgactctcctcttatacttcatatgaatagaatattccaagatagctttcctattgactgacatgactctatattcagttatagttcatttcttttttaaataatcagcattactattttaacaatgatgcctacaccaataactaaagacaatgatgtcaccatttgctttccaattaattttagtgctgactgaccacctaaatgtttcaaaagcattgtcattgtgaccgagcacgctgtaaaagttgaactaaaaaacacaagtagtagtaactgtgttgctgtcattccttgtaataaggcgccctgatgcaaattaaacaagagcatgccgtcttttcgaatcattgaaaataaaatccctggtgacaattctgacgagatgcctaataacgataatataggtagcgcttgaacgataaacatttgtatattttgccacatttgtagcaacatttgacgtatatttggcacatgtaattgcctatcatgaggtagcggaacgctaagttgttgatcattctttttcaaccatatcctattatgtaagatgccacctaaaagtactaatattaagtacggcataaatagccatgactttccagctacactaaaaatagataatgtcgcacctatttgataactacaagaactaccaaagcttattaaactcatacactgcgtcttcgtgcaggtatggcattggtgtgctgcttgtgaaatggctgctgcattacatccaaatccttctaatagtggcacgatatcattaccttgtaatcctatccgtaacattgatggttcaattgtccatatcatccatgatttgaatcctgtttgatcaattatagcagttgataaactaatcaatattacaaccggcaatgcccatacgagcgaatatgttccaagtgatagcacaccataatcaccaaataatatatgctgtaatatatcgtgattgagcaatgttgtttgagttaaatattctatccatgctgatacatactgattttgaaaccaatctgaaaattgataagcgataccgattggcaatgcaaacattaaaaatatcaacaaccaggctaaaaatgtcgcacttattttaggtcttaattgtcgtcgctcatgttgaaatagtgtcaattgttctatcacatgttcgctcgctataggcgaagaaactacactttctgccaatgaaatatctaatttctgttttatgattaataatcttaatttcgctttttctgttgcggtaagtttatccgcatgactaataaccaaataatgaggttcatgaggtatgggcgtataatgccccgttctcatatcatatttcacttctaacatgtgcatgacacttcacaacatgaataatcatctaaatacatttgatttttttggtaattttcaatgacatcttgtttagctggtaagccttcccgctgtgttaaaagatgtgcaagtactgcaaatcgcgctctgaatttatagatatagcataatttggcattatcattttcaactgttgcaccaatcataaaaatattcggataacgtgtcgattcatcatgtgttgttaatttaatatcttgatttgttgtcacaaataattgttgaacgattggattttttgttgcatcaaagccagttgctagtattggttcatgaggcgtatgcacactttgtccgctatcaaaactgatatgatactgtccatcgttaaaatcaatatctttaactgtataatgtacattcatttcaatgcgagcaccttgcttaatgacgttacctagtctctgacgtgtataaggtgacaatctaacactaggatcagcatccggatcatttaaaccggttgtgctagtataaagtgcgatgtcagagccattttttgcaagttgatatgcagcatcaaaaccactttcattacctccgataaccacatattgtcccttattaaagttatcaaagtcttcaatttcactataatgaataccatatttaaatggctttttagggaaattataatcacctgttgcgacaaagatataatccgcgtgatatgtctctgttgtcgttgcaatcgtataaaatgcatcatctacagatatatctgtgacaactgtattttcaaagatattcagctcgtaatggttggcaaccacttgtaaatattcagcatatgtttctccggaaatatgttcttcattaaatgtaaatgctggtgaagtatccatggaaattgcattcatatcaggcatgccaaatccattagacgtaaatgatggcgtaatcgtacgggtcgatttcggccaatgtttaaatgaatgtcctactgttcctttttctaaaataatgacatctgttataccgaaatcttttaaggtaatggccatacctatacctgcagcaccggcaccgataatagccactttatgatgttgcatattaacactccctcaatgatctatttcaagttattgtttttgattataaatcgtaataattacgatttataaagtatagacctatccttgagaaatttcaatattaaaagaaaaacttccgttattgtagagaattcatctacatttcggaagttggaatgtgtcttttttattaaatttaaatatgctacggttagttcaaatgattatgaatgacatttaatgttatcatccagcctaagtacttggagataacattttggaggtgagacagaaatcatatttttacaaaatttatttcgtcgtcccaccccaataaagaaaaagtatttctttattgttgtgtaacttctccacgttgtatttcactatccaaattttgtttcatattatcaaacaactcttgaaatctaacctcatcttgatcagaataacctttaaaaataactgaatctatattttcctcgttaaaataataaatttcatcttccacaacaccaatcggatatttacatgcagaatagtcaaacatatacttttgattttcaatttctacaattggtcctctattaataatcattaacttttgcgaaccttcttttaaataaataatgcttcctattgtttccatttattttcctcctttgtcgccatctcgatttcgatattccttcgcatttccaagtcaatcatctcttcttccgctttacgaatgccatgttgaatttgctgttgttgctcgtataacgcttccgttgaacgtcgtttcgcaaaatgaaattcatcgcggaactgttccatacgactagccatattgctactataataacgctcacctaaatgttgatataattgttctatcgaatgattaagcgcatcgctttcatctatcaatgctttaacctcttgcttttcatcatataagtcatccatttgcttatgtttcgctgtgatcattttattgattccatcaagtttattcgacatcatttcaccacgttttaatttttaccaatttcattaccaatcattacatcagtttggtcaaaagcctcaccaactttttgtatattaccgctcgcagttcgtattgcttcagcaacagattgattcttactaatcaaatcatctatcacactatgagcattattatttccacttactgttgtactttcatctttatccggtttcgacacattattacatgtttcaacagcgcttttaatagatgatgatgcactattggtcttaaaaatatcactttgaactgtactcatcatttacacctctccccatttaaattattttaaaattattagaaactgtatcaatatatgatattcaaacattcaataatacttaaatattgttttgtgattatattcaaaattattgtatcaataaatatgtatcattcctagaattttattgaacaaaaagttagaaaatcacttttattgcaactcaatcttgttttgcattatagaaattaacaatagagattaaaattttattttccaacaataaaaaagcacaaatatttttattgaggcagctgaaggccttctcattataaaaatatctgtgcatattattatctcaatctaacgtaataactaacctgttgtatcttgtaaaatcttatccatagagtgcgcaacactatcacggtacatctccccaaatttcaataaatgcaccatcaataaatataaacgataaaattcaagtctataggatgcaccttttgcgagtggataatgtttattatacgcatcataaaattcgctcgtaaagccaccaaataccgttgtaataccgatatcaaattctctgtcaccatataatggtgctggatcaaataacgccggacgaccatcttgtaagaacatataattaccaccccataggtcaccatgtaataaagatggtttactttgatgattttctaattccgccacaatttgacgtcgcactttgtcatatactttgatatcgttggcatcccatagccctctatttagcaactcatctttcaaatggtccatgcgcttgtcgacaaaaatggtacaccaatcgtctggccaatgattatcaaaagaaatatcgccaccttcataaggtaatgagaagccaaatttgccttcttcttgttgctgactgtgtaattgagctacgagttgccctaattggcgttgactccctgaagccccttcttctaaatacgtcatcactaaatacgcatcaccgttaacctcgccacttgcaattactctaggtgccgtgataccagcacgttcaaattcatttaaacctgcaatttctgcaacataaaatgattctttacgtccacgttggacaagtaagaaaaatgtatccgtatccgtttcgactcgatatgcttcgtttacatcgccaccactcactcgtgaaatctctttaatatcttttaaaggtaaatgctctaaccattgttcattcatacaaacaccttccattacgcttactttatactattatattgcctaattaggattatttaatctcaaaataacttgtggtacttgcgtcaattttcaaaactttttagttttaactaggaaattatgtagggaaatgctagtctattaaaagaatatatttcacatatattaagttgaggatagtaagcctcaaatataatgaaataggagcatactcatgtacaaattaattaaacctttcttattcaaaatcgaacccgaaaaagcacacggactaactatcgatgcattaaaaacgttacaaaaatttccagttttattccctgtcgtcgataaactatttacttataagaatccaacgttatcacaaacgatacaaggtaatacgtacgacaatccaattggcttagcagctggtttcgacaaatcttgcgaagtaccaaaagcattggaacaccttggattcggtgctttagaattaggtggtatcacacctaaacctcaaccgggtaaccctcaaccacgcatgttcagattattagaagatgatgccttgataaatcgtatgggcttcaataatattggtatgaacaaagcactcagtcatttgcgtaaaaatgcttatcaagtacctgttggtatcaatgttggtgtgaataaaatgacaccttatgaagcgcgttatcaagattatataaaagtcattgatacgtttaaacacgacgtatcatttttcacagtcaatatcagttctccaaatactgaaaaccttcaaaatttccatgataaagatgaattttcaatgttatgtcaagctttgacaacatttaaaaaacagcacgatgtaacagtgccaatttacttaaaactaacgtctgatatggatttcgatggcttaaaagcactattaccagcgattactgagacatttgacggtatcatcttagcaaacacaacgcgacaacgagatggtttaacttctgctaataaagtcgaagaaggcggtttaagtggtcgtccattatttgaacgtaatttaaaattgattaagtatgcttatcagcaaacaaatggtgaatttttaattataggtacaggcggcgtattcagtactgaagatgcaatcaaaatgatgcgtcacggtgcgtcacttattcaaatttattcatcacttgttattgaaggcccaggtttaactaagaaaatgaacaaaggcatcgcacgttacttaaaagatcatcattttgacaatgtcagtgatattataggactagatgcctaatccaacgtagtcaaataatactttaaaacttgctgaatcgtcttattaaaattatgatataactcaagaagatatatttatcaccatttttcaaaataatggcttaaatatcacatatcattaaatatagcgttttataacggaggcgtttgttatgactaaagaaacagataataaaaaaacagtagcgacttctgacaacaaagacacacagcaacaaaatcaacctgaagaaaatgaacgtcaaggtttgaatggttatcgtaaaacagatcttgatttagaaatcgagcaagagctacgtgaaatgatgaaaacaggagaaaatgaaacgaaaaatgactacaaaaagtttaaagtgttttcacttatttcaacacttgttattgtcattttagcaattataagatttgttcataaaatgatgtaattagagtgagacattgttttatgtctcaggatccagtcattcattatagctacaatatttacgattatataaataacccgagattttagtatgattcatttcactaaagtctcgggtttctatttgataatttttaatagggcatgacttgtatatgcgcctgccttttatctcatttccaatgattaatctggatattgttctaaaaatgctttcgcttctttattaactgttttaaaatcaataccttgttgcatcgctgcaaagacacatccacaataacactgcctaaagatattatagtcattacacatttctatggaacgctcataacctttacttttcttaaaatcacttggcaaatagttcacatcgtatattttttggacatccataccaagttcattgattaattgtgcgttctttttaggtgataacgtgattgcactgccaaaataatcatagccatgttctacagctgctttcgctacaatatccaaacgcatttcaaaacaagcggtacaacgtaagccgccttctttttcatcagctaattctttatccttcaccattttcacaaacttatgcggttcataaggtgcttcaatatacttcacattcgcaccagtcttgcgattaaaatcttccacaaattgttcttgcactttagcacgtcgtaaatactcatttttcggatgaatatttgaattcgcgaaataaattgcaatgtctgcatattgtgttaaaaactctaatgtatatgtactacaaggtgcacaacaactatgcaataagattttaggtctgattgcttctctttcccactgcccgattaatttcttcaacaccttgtcataattaattttttgatttttcattttactgataataggttcagcattaatcatgatttaacctcccacatttaatcattaacttctattatatatgattcatattaaatgtcagtcaaaaaagttataaattcattttaatgcatttatatttcgaaaatcccttatgtatctaaaagcattttttaaacttgaattttaaaacactaaacaacacatacgtctctgtatcattttcatattttgttatatatatgtttactttatttaaatcaatttcatcttataatttatcgtgtattttgcaaaagattgacttcaattcatcgtaaaagttatacttttgccaatttttaatgtaacatggtgttagtaataaaaataatacattgaggtgttttacatgacagcattattcccttatatcgcttttgaaaattcaaaagaagcccttgcatattacgaagaagtatttggtgcaactgacgttaaatgtttagaagttggcgaagaacaagcgtcacattttggtatgactaaggaagaagcgcaagaagcaactatgcatgctgaatttgaagtgcttggcgtaaaagttctatgttctgattcttttggtcgcgctgacaaaattaataatggcatatcattattaattgattatgatgttaacaataaggaagatgctgataaagttgaagcattctatgagcaaattaaagatcattcttcaattgaaatcgaattaccgtttgctgaccaattctggggtggcaaaatgggcatctttaccgataaatacggtgttcgttggatgttacatggtcaagactatactgcaatccaacaataatgttattgataaagatatcatttaataaacttatgttatttagcaaggcaagccactctcgattcatggcttgccttattttattgtatatttttaattatcgttgctggcccttgattgacaatcgtattaaaatgcattattaagtcaactttgtctatacggtttggatcttctacccaatgtcttatcaaagacaatcccgcacctgaaacataactcatgaaataagaaaatggtataccattaatttgatcattttcatttttataacgttgtaaatgacacataattaaatcataaagtttttcgtggatatttgaatctttacccatacgaaacatcaattgataaaatgcgatgtctttttctatcatttctattaaaacggtcataatttgatgtatgttatctgtggataacttaactgctccatttaacttctcatcttgaatgaagtctcttatttcctccaactgctggtcctctaatttttcaagcaaatcatatttatcataataatgcgtataaaatgtactacggttaacatcagctaaatctgcaatttgttgcacagtaatctcttctaattggtgttgatgtaaaagttcgataaatgcatttctcattgcaacttgtgattttctaatacgtcgatctatagtcatttatatcaagtcctccccaatgattataaacaattataaacgttatgttcattatcctacaaatctccaacattgatgattggcacacaatgtttacctgtttaatataggtgatacaaacaaacagaaaaaggtgataacaatgaaccaacatttactaggaaatccaaaattaactataactcatgtcaatgaagtgaaagccggtattaaccacatcgttgtcgacagtgttcaatatggaaatcaagaaatgattatggaaaaagatgtcactgtggaaatgcgcgatggcgaaaaattatatattaatattttcagaccaaataaagatggcaaattccctgtagttatgtctgcagatacttacggtaaagataataagcctaaaatcacaaatatgggtgccctttggccaacattaggcgccattccgacatctagttttacacctgaagaatcaccagacccaggattttgggtgccaaatgattatgttgtagttaaagttgcattacgcggtagtgacaaatcaaaaggcgtcttatctccatggtcaaaaagagaagcggaagattattacgaagtgattgaatgggcagcaaatcagtcatggagtaatggaaatatcgggacaaatggcgtttcttatcttgcggtgactcaatggtgggtcgcatcattaaatccaccacatttaaaagcaatgattccttgggaaggcttaaatgatatgtatagagaagtagcctttcacggaggtatatcggatactggcttttatcgtttctggactcaaggtatttttgcgagatggacagataatccaaatatcgaagacttgattcaagcacaacaagaacaccctttgttcgatgatttttggaaacagcgtcaagtgccattatcacaaattaaaacacctctactaacatgtgctagttggtctacacaaggtttgcacaaccgtggctcttttgaaggatttaaacaagcagcatcagaagaaaaatggctatatgtgcatggacgtaaagagtgggaaagttactacgctagagaaaatctcgaacgccaaaaatcattctttgatttttaccttaaagaagaaaataacgattggaaagatacgcctcatgtcatttatgaagttagagatcaattttataaaggcgaattcaaatcagcgtcagcgttccctttacctaacacagaatatacaccattgtatttgaatgctgaaaatcacacattgaatcatgcaaagattagtagcgcgcatgtcgcacaatatgactctgaagataaacgacaagatgtaagttttaaatatacgtttgacaaagatactgagttagttggaaacatgaacttaaaactatgggtaagcactaaagactcagacgatatggatttatttgcaggtattaaaaagttagatcgtcgtggtaatgaagttaacttccctgattttaatcacattgaaaatggtcaagtagctactggttggttacgcgtatcacatcgtgaattagatcaagaaaaatccacaatcgcgcaaccttggcataaacatgaaacagaattaaagttgtcacaagatgagattgtacctgttgaaatcgaattgttaccttcaggcacgctatttaaacaaggcgaaacattggaagttgttgtaaaaggtagtgaaattgtaattggtaatagtacccctggcatgaaaacacgttatgaacatgaagaaaccgtaaataaaggcatgcacatgatttatactggtggtaaatatgattcacaattaatcattcctatcgttaattgatatgaagcaattacggtcgattttgattaaaagtgacatagtgataggactgtataacaagagaaagccacacgcttggaatcttaaaccaaggtgtggccctttttattatttatagctatttaattttataaatcttgtcactaaacttactacaagcaatattaaaccaataaataaagccataattgctgtattactttcgttgtttactcctgtttttggcaattctttcaattgttgcttatgtcctgacttgctcttgctatccaaatgaatactttgttgtttagccatttgtttattactttttgtgtgaacatcatttgctttaatacttggatttacagcactattattcgatgttccatttgcgtttttcaactgattaataacatttggatctttcgtgccatctattaagttatctggatgttttagtaaatgtctgcagtcggatactattttagaatcttttgcctttaccgcattattcggcacctcattatcatctttcaactgcttgataacatctggatctttcgtgccatctattaaattatcaagttttttcacacgtgctatgtcactaactggccctggataatttgcatccggttgtctaactggtattaaattgctgttttcattcacaccttcaggtttgttattttcggcgttcgcattatccgtaaaaatcaacactgataaaattgcaacaaataaacttataacttttttcatcttattcaccttcttcagaccatcattctatttagtataattttattatataattgctatcaattcaatattttcacttcacgaaactaaacaacatgtcattaacttatctcgttaagttaagaattctattttctaccaaataaattctgaatactgttttagataatcaattcgcaaaactatttctttataaatatgtccatcatttaacactgctaaaattgcaacgataatacctttacttctattacgctaacccaattggcataaaaataaaaacccctaatggataactacattgttatctactagaggtttctaacttatactattttataacactatcgtattttctttttcatgaatcatttcaataatgacattgtcttcattcattactgctactttaggtgcatggtgtttaatttcttcttcattcaactgtgcataagtcatgattatgactacatcgcctacttcaacaagtcttgacgctgcaccgtttaaacaaattttaccactacctctttcaccagctattacgtatgtttcaaaacgtgcaccattattattattcacgatggctactttttcatttggcaagatgtctaccgcttccaatatatctgaatcaatcgtaatgctacctacataatttaaatttgactcagtcactcttgctctatgaattttagcattcatcattgttcttatcactttattcagctccaattattatattatctattaaacgcgcttttgaaaatttgacagctaacgagataaatatgcgtccagttatttcgtgttgttctactaattgaggataactataaacagcaacttcttcaatgcgtccacttatatgtgattcaagatattgagtaaccctgtctataattactttactttgacgttcaccgtcttgatacaacgcttgtgctaatagcaaacttttacttaaatgtaccgcttcttgtcgttcttgctccgttaaataaacatttcttgaacttttcgccaaaccatctgcttctcgaacgatatcaataccaataatttcaacggcatgattgaagtcttttaccatttgctcgacaatagccaattgctgggcatcttttttaccaaaataagcataatccggcataacaatattaaatagcttattaactactgttaccaccccatcaaaatgccctggacgcttcgctccttctaacacatcagctaatggacctactttgacatcaatacctaattcacctggatacatatcttctactgcaggatgaaaaacaatgtccgcccctacttctgatactaattctaaatctttatcaatttgtctcggataagcatcgaaatcttcgtttggaccaaattgtaatggattaacaaatacactcacaactgtaatatcatttgtactaactgattcgcgtaccatcgttaaatgtccatcatgtaaggcacccattgttgggataaaaccaatcgttgtgcctgagcgtttggctgctttaacaatgtgttgcatctcttttaccgtagtaatcagcttagtcattgttattaacctcattcataattttctttttatacgtatattcttctgatggaaatgcaccagatttaacttcttgatcgtattgttttaaaccatctacaccaacactaaaatcagcaaattgcttcacaaatttcgctttatgttcaacaccataatttaacatatcgtgataaaccaatacttgaccatctgtaccttttcctgcaccaataccaatgactggaattgttaaatgcttgctaatttcttctgctaaatcatttggaattgcttcaagtactaacgcaactgcaccagcttgttctacatttttcgcatctaaaataagttgctcagctgcttctttcgttgcaccttgtaatttatatcccataacgccaacactttgaggtgttaatcctaaatgtgcaacaacaggaataccaattgccgttgctttttcaataaatggtgtaatatgcgctccttctgctttaattgcatttgcattcgtctcctgataaagctttagagcatgatttaagtcttgtgtcatagagatgcctactgcaccaatcggcatatcaacaactacaaatgtatttggtgcgcctcttcttactgcacgaccgtgatgaatcatatctgctaacgtcacttgtacggtactttcataacctaatacagtcataccaagtgaatccccaacaagaatcatatcaatacccgctgcttccacttgtttagcacttggaaaatcataagctgttaccatagaaattttagtttgcttttgtttcatatctattaattgacttactgttttcaatgttattcaacctctttttgcagtattattagaaatagtataatgaatcttttatagaaaggaaagaagaagatgttatcagttgcgattattggcccaggcgctgtcggtacaactattgcctatgaattacaacaatcattgcctcatacaacgcttatcgggagacacgccaaaacaataacatattatactgtaccacatgcacctgcacaagatattgttgtgaaaggttatgaagatgtcacaaacacatttgatgttattattattgcagtcaaaacacatcaacttgatgcagttattcctcatttaactcatcttgcacatgaggacacgctcatcattttagcccaaaatggttatggtcaactcgaacatattccatttaaaaacgtatgccaagcagttgtctatataagtggtcaaaagaaaggcgatgttgttacgcacttcagagattatcaattacgtatacaagataatgcattaactcgacaatttagagatttggtccaagacagtcaaatcgacattgtactagaagcaaatattcaacaagctatttggtataaattgttagttaacttgggcattaattctatcacagcactcgggagacagacagttgcaatcatgcataatcctgaaatacgtacactgtgtagacagctattactagatggttgtcgtgttgcacaggcagaggggttaaacttttcagaacaaactgtcgatactattatgactatatatcaaggttatcccgacgaaatgggaacgagcatgtattacgacattgtgcatcagcaacctcttgaagtcgaagcgattcaaggctttatttatcgacgtgcacgtgaacacaatcttgacaccccatatcttgatactatttatagctttttacgcgcgtatcaacaaaatatgtaagcacatatataatataaaaagaccttaacgatgcatttagaatcacctgttcttaatatcgctaaggtcttttaattatattagactattcagcttctctaatttcttctgccacatctttatagtctattttcgctttaacaaacgtctcgttatttaccgggaaatgttgttggaatgtttcaaagttttgtatctcaacgacaacgtcatccacttcaaagtcaagaacatgtccaccataagctctttcatcatccgcaaaatgtatatgaaaaccagcagaccctacgccatgaaataattctggtgtaaaaaatccaacaatggcaccacgaatatcttgtcttttttcctcaggttgtctgcgtgctgaatcaatcaaacgtgtatatggcggttgctgagcaggcatcattcgtacatgcatatgtttaaatgtgccataaattttaacagccgaaaataaattctcacttaacatttcatttttaatttgtgcgaatacatcatcttgtgataattgttgcaatggaaatgtcttactcgctttaaaattagtaatcgatgcatacggtactttatcatcgccttttaattctataaattctttatgctcgttagcatgatatgccttcccgtctaaaaatattacttcgccatcagaccctgttaacgttgcaatccctaaatttccatgttctaacaattcattaattgtagctgttccttctagtaagccagccattaacgtacctaatgtaccatgttgatacaagacattcgtcattccaaaaccatctccctatagttattcctcgttgtcatgctctacttcgtgcttaatgcagaactactttcctttatactcaatgacgcctcgacatttctattcatgtcactaaattttcacgagtcataatactttattcaattattattttacgcaaaagtattgcctctatcaatgcttgctaaaaaaatggacctatcagtgccacatgttaccgcaacactaatagatcctcttaccattaatatatttctaattaatacttaaaataggcttagtcttctaataaatatttaattgaatcaaatgtatcttctaatgttttaacagatttatcgaacaatgcttgttcttctgcacttaatggcatttcataaattttaactgcgccatgttggttaactaatgttggtacacctaggtaaacgcctttgtgaccaccatattgaccatctaattgtatagaaacatttaagacattattttcattatttaaaatggcttttgaaatgcgcatcaatgctaatgcaataccatagtatgttgaccctttagcttggataatttcataagcagcgtcacgtgtattcacataaatttcttccgctttagcttcgctaccagtttgttcttttaatgtgtcatatactgaaatacctgctacatttgcttgtgaccaaactgcaagttcagtatcaccatgctcaccaataatactagcgtcaacacttgaaggtgcaacaccaagttcttggctaattaaatattgtaaacgtgcactgtccaatacagtacctgaaccgataacacgctctgctggcaatccagtatattcttttacaaatcttgttaaaatgtctacagggtttgccgcgattaagaaatatccatcaaagccgctatccataacactcttaacaatgctcttcataatcttagtatttttttcaactaattgtaaacgtgtttcacctggcttttgaggtgcaccagctgtaataacaactaaatctgcatctttacagtcttcgtattcacctgctttcacatcaactggtgaaggactgtggactgtaccatggtttaaatcttgaacatctgcttttactttgtcttttgcaatgtcaataattacaaattcatcagcaacaccttgcgtaaccattgcaaaggcatagcttgatcctacagatccatctccgattaatacaacctttttaccaaatgttttcataattatgtctcctaacctaattgaatttattttacacgtgactacacgtaaaaatatctatactgaaattaaagattaacaattttattttattataatattatgctaccaaattacaaacataaaactgagatgtaagcggagtcaaattacactctaacgccaataaatattgatatctcaagctttagcacgtaatttgaaatttgtgacaatttttagcattctaaaattgcataatgacgctatttaaagcctttaacaaactattgatctttctatttttttcattttaaaaagaatggctattcgacttaaatgacttactatataacctcctattttccgccttaccctcatcatatttgatgcatctttttatagtcaaagaattacatttcatacaaactagccaatcagacataaacatgaaattgattttaaaaatataatgtgcaaaattgttagaaaattagcaaaaaatagtacttattcatttaatatctgttataatcagttttatcatttaaaaaatctatggatgttatcaagacaagtcattaatacgtaacataaagttgtgatttttcagaatttttagacaaaatattgattatttgtgctatgatataacatattaaaaaacaccgtatagaattgtttatgaatgtttgggaggaaagtttatgggaagttttttcaataaaatagcacgaaaagaggatccggctatctatcaaaataaagatggtcatttaaagcgtacacttcgggtgcgtgatttcttagctttaggtgtaggaacaattgtatcgacatctatctttacgctacctggcattgttgctgcagaacatgcaggaccggccgttgcgttatcattcttactcgctgctattgttgctggtttagttgcatttacttatgcagaaatggctgccgctatgccatttgcaggttcagcctattcttgggtcaatgtattatttggtgaattttttggatgggttgccggttgggctttattagctgaatattttatcgccgtagcctttgttgcatcaggattctcagcgaatttacgcggacttgtgaaaccaattggcatcgaattacctgcagcattatcaaatccatttggtacgaatggcggttttatcgatattattgctgctatcgttattttattaactgcattattactatcacgtggtatgtcggaagcagcacgtatggaaaatattttagttattttaaaagtattagctattattttatttgtaatcgtaggtttaacagcaataaatgttagtaactatgtgccatttattccagaacacaaagtaactgctacaggtgactttggtggatggcaaggcatatatgctggtgtttcaatgattttcttagcgtatatcggtttcgattctatcgcagcaaactcagcagaagcacttgaccctcaaaagacaatgcctagaggtattcttggttctttaagtgttgctatcgtattatttattgctgtagcacttgtgttagttggtatgttccattactcacaatacgcaaacaatgctgaacctgttggttgggctttacgtcaaagtggtcatggtgttgtagcagctattgttcaagctatctctgttatcggtatgtttacagcattaattggtatgatgttagcaggctcacgtttactttattcatttggacgtgacggcttattaccttcatggttaagccacttaaacgacaaacatttacctaatcgcgcactagttatacttactattattggtgttttaattggttctatgttcccattcgcatttttagcacaattaatttcagcaggtacacttgttgcatttatgttcgtttcattagcaatgtatcgtttgagaaagcgtgaaggtaaagatctaccaattcctgcatttaaattacctttatatcctgtgttaccagcagttacatttgttttagtattcctagtattctggggattaggattcgaagcgaaattatacactttaatttggtttattgttggtatcattctatatttaagttatggacttagacattctaagaaaaatgacgtagctgaataccacccaccaaaataaaaatcaaaaaaatcatttcccatctgattaacatccagatgtggaaatgattttttattttatattaagagaatcgctattaccaaccttgtccagatatgtcatattgatctaagttacctgtttccaaaatagtcagtgcatcttctatagtgtttaacgccgtgtctaattgctcatatgttatcaccaatggcggttggaatcgcaacacatttcctgctacagctataataactacgccatgctcaaagcagtaattacaaattttaagtgccgcactggcatcacgtgttttgagttttttgtcggaaacaatatcaataccaatgctcagacctttacctctaacatcgcctacactattgtatttagatacccattgattcattcgtttcctaacatattcccctttttccgcactagcctgaagaagcgactgatcttcaatcatttgaattgtggctaatgcagcttcacaactaactggattagcacctgttgtaaataaatgtgctggtgcttctaaacaattcataatctctttgcgtccaacaattgctgacataggcataccacctgctaaagattttccgaaagtgattaaatcaggcgtaaaattaaagtgcgagactgaactccatgtacctgttcgcccaaaaccttgttgaatatcatcgacagcgattaaaataccatgttcacgacaaatcttttctaacgcttcaaaataccctggaactggttctaaaagtccaccatcgccttgtatcgtttcaataacaatacatgctacttcgtcagcaggtacatatttcgcaaacatttcttttaagggtgctaaatattcttctactgaattagcttgtggctgctcgtacataccacgatatttatctggaaacggaatatgataaaagccattcaataacggaccataatgtttgcgcatatttaaactaatagctgacatagacaacgagccaaaagttgaaccatgatatgcattagtgaaactaatgatataaggacgccctgtatatgctctggcaaatttaatgatgccatcatttgcgtctgatccagttaatccgaaggtcactcttttttcaaaatctccaggtgcaatctcacaaagcttcttagctaaacgtaccaacggttcatgatacatatatgctggtgtataatgaataaatttatcaacttgtgcctttatcgcttctgttacttctctaggtgcatgacctacgttttgagaactcgcactcgataacaaatcgatatatgtcttcccctcaatatcaaccaatgttgctccatatccatgatcaataactaacggataatatttaatacgtcctgatttcgcaaaatattgttcatcctcttgaattaattgatgtgctttactcatatacattcccctcccattgacagaccttattcgtataattaccttccctacatcgataaccacattcaatttgatatcacgtgaaaatactgtcatgtcattatgaatactatccaatatactaataaatttcagatttgtaaatatattctgataattaagaattttatatcaatctactttgtttatgcgcataattttgttcgattagggaattgtttactatattccatttgactctgaggtgatatgaatgcgtttaaaagtattgttccatttcattgctgctattttcatatcattcatgttgctatggatgaccatgttgttcgacataactagcgatcaatcacatttaaaagctttattattgaatttagattttctaattccttctgacaatacaccatatactctagaaataatatgtcacttactaattggtagcgtcatttattttgtatttgtgttgctgtttcatatttctaaaaggctttactatctatgttatatccctttagttttcttatttatagcattgtatccctttttagtatttattgcgcaacgtccaatttttcaatttagtgtgacagaattaatcggttggattattacacatattttctttatgtcattaatggcgttagtcatacctagaataaaataatatttttaattaaactgacaattatttttcacattttatacacttttcaaggtttatgacttgagaaatgttctcatttttatcatactggaggtgtattgaaaagttaaggagtggaaagtatgaataaagagcaattagaaaaaatgaaaaatggaaaaggctttattgccgcattagaccaaagtggtggtagtacaccaaaagcacttaaagaatatggtgtaaacgaagatcaatatagcaatgaagacgaaatgttccaacttgttcacgatatgcgtacacgtgtggtaacttcaccttcattctcaccagataaaattttgggtgctattcttttcgaacaaacaatggatcgcgaagtagaaggcaaatacactgcagattacttagctgataaaggtgttgttccgttcttaaaagtagacaaaggtcttgctgaagagcaaaatggtgttcaattaatgaaaccaatcgacaacttaaacagcttattagatcgtgcaaacgagcgtcacatttttggtacaaaaatgcgttctaatattttagaattaaatgaacaaggtatcaaagacgttgttgaacaacaatttgaagtcgctaaacaaattattgctaaagggttagtgccaattatcgaaccagaagttaatattaacgcaaaagataaagctgaaattgaaaaagtattaaaagctgagcttaaaaaaggtttagacagcttaaatgctgatcaattagttatgttaaaattaacaattcctactgaagctaacttatacaaagacttagctgaacatccaaatgttgttcgtatcgttgtattatcaggtggttacagcagagaaaaagcgaacgaattacttaaagataacgctgaacttatcgcaagcttctcacgtgcattagctagtgatttaagagctggacaatctaaagaagaattcgataaagcattaggtgacgctgtagaatcaatctacgacgcatctgtaaacaaaaactaatttatacattaaacgtattttttgatataaactactaaaaaggactcatacatgtgctttaaaggcattgtgtatgagtctttttgattaaagttgattttgcgtatgtattatagattacgcaaaaaaatcggacagctgaaaaatctataagatttctcagttgcccgattttaaatatagctattagaatttagttttcgtagtaacctaattctaagtcttttgaagtttgtttacggatttttctcattaatttttcgtcttcaattaatgattcaccgtatgatggaatcattttcttgattttaggtgcccatttagttttgtattcagggaagttacgttctaatacttctaacgcaactgaaactgaagttgaagcccctggtgattcacctaataatgcgattacagtgtggtcttgtgagttaaccacttctgtaccgaattggatgaatcctttaccgtgttcaggtgtatctttgataacttgtacacgtttaccagcagtgtataattgccaatcttcgttacgtgcttctggatagaaagtacgtaaatggttcatacaaccttcttttgtcataatcacttgatcaaatgagtatttaattaaaggtaagtttttaacagctgctgctaataaagttgtaatgttgtatgttttaactgatttgaataaatctaagttagaaccatttttcaagaatttaggtccaacattagcaaatggtccaaataacaatgttctttggccgtcaatgtaacgcgtatctaaatgaggtacagtcattggtggtgtaccaggtggctctttaccataaactttggcatcgtgttgttcaataacttgtgggtttgtacaagctaagaattgaccactgatagggaatccacctaaatgtttactttcagggatacctgttttttgtaataatggaattgctccaccgccagcaccgatgaatacgtagtcagttacttgtttgaatttctcaccagttaggcgatttttaacagtaacttcccattgaccatttgataattgttcaaaatcaacaacttcatggttaaattgcactgtagcatttggatgtgcttcaatgcttttagccattttacgtgttaattcaccgaagtttacatctgtaccttcgtcaattttacttgccgccatgataccagggttatcttcacggcctttcatcatcaatggaatccattttttcattacttcgatgtcttcagtatattcgatattatcgaacatagggaaagctttcatcgcttcgtaacgatcttttaagaatttaacattgtttttacctctaacataactgatgtgtggtaatggattgataaattctcttgggttctcgatgctaccgcttttcactaagtgaccccagaattgttttgaaatctcaaactcttcgttaatcactttcgctttttcgatgtcgatagaaccatcaggttgtaaaactgtgtagttcaactcacataatgctgcatgacccgtaccagcattatttctttcgtttgaactttcgattgcaggacgatccaagcgttcgtaaacgtggatattccagtctggctcaatttcttttaacattgaaccaaatgttgtgctaagtacaccggctccaattaaaacgatgtctttactattagacttagccattggtttcacctctccaaaaattgtaaatgtgtatcatcaatatgaaagttacataaaactgacatatttctttaaaatatcaacgccatagataacttcctgttttaattgatacgctgtaacaaaatactatagttagtgcttacatatatatgttaaagcaagcagtggtaaatgtaaattataattattcattaactttgcaatatattaaatcttttattcatagaagataaatatcaaatcgatcataattatttgacaacaaatagctaacaattgttttaatctacatttgacttatagcattttaaacatatactctattttgatacaatataagtgtaaaatcaatcataaaaaggagattcaatatatgcatctaagaaaatcacttcaattacctttaatattgaaatttattttgaatcttgcccttataggtattgtaattatcgttctaacacatactgagtttcaacttaatgccggtgatagtaatgtgtttttattaaactgggatattcgaggtttaacatcttatattttctcattcttaatactggttgcgcttgtttctaaactaattttaatatttataactagacgacaaagaacatcataaataaacaagcagtccagtgcgtatcatcataccttacgcattggactgctttgctatgtttattgattgctatctttttgttgttgccatttttctatttcagcatctcgtagttcaacacgacgaattttacctgagtttgtttttggtaagtcgtcaacgaattcaatctctctcggatatttatatggtgcaacttcatttttaacaaattgttgtagttctttaactagcgtatcatcacccgcagtatgatcctgtaaaataacgaatgctttaacaatatttccacgtatatcatgaggttttgctactacagcacattctttaacggctggatgattcgttaacgcatcttcaacttcaaaaggcccaatcgtatagcctgaactaataataatgtcatctcgacgtccttcaaaccagaaataaccatcatcatctacatgagctaagtcaccagtgatgtagtatttacctgtttgcgctttcgccgtacgttctggctctttataataccctttgaaaagtgctggcaaatcaagtggcactgcaatattccctttcgtattagcaggtacgctattcccctcatcatctactacagtgaccgaactacccggaatgcctttacccattgatccaatcctttgtggtgtatcttttaaaaagcctataagcaaggtactttcagtctggccatatccatctcttacagttaaattaaagtatttcttgaattgttcaactacttctcgatttagtggctcacctgcagaaacggcactatgtaaatgcgttaagtcataatcatttaagttctgtaatttagccatcatacgatattctgtcggtgtacaacataaaacattaatttgatatttttgaagcaattctaagtatgtttcagggctgaatcttccattaaatacaaaagcagttgcacctgaacctaatacagataagaaaggactccatacccatttttgccaacctggtgctgctgttgcccaaactaagtcatcttcattaatacataaccaatgttttggtgccatttgtaaatgtgcaaatccccatccatgacaatgtgtaacggctttaggattgccagttgtaccagatgtatatgacagaatcgccatatcatcacgcgtcgtatctgccatttctagtttgttacttgcgttttctttttcagcttcaagtgaaatccatccatctttttgaccggcaataacaaatttagttaacgcatcatattctttaattttttcaaattcaactgtgaatggctctaatgcaatgactgcatttatttcaccgtgtgtgatacggtattgtaaatctttagttcttagcatttcagaacatggaatgattgcaacacctaattttaaagcagcaatatataattcatacgtcgcaatagatcgtggcatcataatgagtactttatcgcctttagataaaccatgcgatgctaaaacattacctactttattagactgttcaatgagctgttggtaagtgactgatatatcttcgccttcagtattatgatataaaatcgcctttttatctggtatgtggctatatttttcgatttccgaaataatgttatatttttcaggcgcgaatagagctgacttttgcataactaacttcctttcatacatccacttttcctgtgatgaacattgtaattttataaatgaattatatatatcatacgcctatctttacagaattttcaattaaatagggttaaatatcaaagtcctcgacactacactttgacatgacgtagcattcaaggactttcaaatgattgaggggtgatatctcgggctagaccatatcagctaattcaatacgaatattgtatgataattcacgattaattatttttacatctgcacctttcgaagtgccacgatgcttgtgtgtatgcttgtactcagctgaattttgccaatgataaaatgcttgcctattttcccacagcgtaataatgatatagtgtctaccagctgttctaggtcttaaaaaccttaatgctttaaacccatcaacgttttgcaaatgtttatttcgttgtaaaaacttttgctcgaaagtttcttcttgtccttcgttaatatataaatgatttaacacacataatgaatcatttgataaatcatttatcgcttctagaacatcgtaatatgcagtgtcattatttttttgtattgtgagacaatcatccagttcttctattacataacttctatattcatcataaatgttcataatacatgccttcatttcatttatatttttggtcatattactttatatctattactaattcattcccgtatttattaattacaatcatagtttggcttctttttaaaaaataagactttgtaaaaagtattaatatttcatacaaatggggacaggagtcgcccgctatttttgtgtcttcaatttcataatcattatttaacattagtcatgaaaatagccgacaacttcatctgtgaaatcaccggccttttattttagctaactttatttctgattttacgattttaattgatcatacagagaaagtgatctttttacaatttctaaaaactcatgatctatattagacatttgatgaaaataagacaaaatgttttctgttagcttctcttgttttgggaatgaatcatcttctttaatccaaatcgctaattcgcctaatggtgttttatcatctttaaatgtttgtatatattcgtaaaagctcatagtattccttctctcaatttacttatataaatcctaccacgaaagctttcaagaaaacacaattaaatgtctatttagtgaacttttatggttgtacactcttttaatgtctgccaattaggtcaattaatcatcacaatgtacaattaactctattttcagttcatatactcacacaccgtttttgaacaacacattaacttctcatttagataaaacgcaaaaaagcctggcaccaatacaatagatgccagactaagagtctactatataaatttatttagcatatggttttacttcgattgcaccttcattttcatcatgaacaccatgcttataataatcaatatattgtggctctaaaggctttctgccacgtataatgtctgctgctttttcagctaacattaaaacaggtgcatgtatattgccatttgtcgtacgtggcatagctgatgcatcaactacacgtaaattttccataccgtggactttcattgttaacgggtcaactactgccattggatctgaagcaggacccattttagcactacaagatgggtgtaatgctgtttcaccatctctacgaacccaatcaagaatttcttcgtctgtttgcacttctggtcctggtgaaatttctccaccattgaatggatccattgctttttgagataagatatttcttgctacacgaattgcttctacccattcttttttatcttcttctgttgataaataattaaagcggatacttggtttttcgaatggatctttagatttgattttcaagctaccacgagagtttgaatacattggtcctacgtgaacttgataaccatgtgcgaccgctgccttttgaccatcatatcttacagctattggtaagaaatggaacattaagttaggataatcaacttcgttatttgaacgtacaaatccgccaccttcaaaatggttagatgctgctgcacctgtacgtgtgaaaatccattgtaaaccaataaatggcatacgcttgatatctaagcttggctgtaatgatacaggttccttacatttatgttgaatgtatacctctaagtgatcttcaaagttttcacccacaccaggtaaatgaacacgtggctcaatgccttttgattttaggaactctgaatcaccgataccagataattgtagtaattgtggcgtattgaatgccccaccagacaagatgacttcattagcatcgatggtatgtagtttgccatttttcttatacgtaacaccagttgctcttctaccttcataatgaatttcagttacaaaggcacgtgtttcaacggttaagtttttacgcttcatagctggatgtaaatatgctcttgaagctgacattcggcgaccacgatgtacttgactatcgaacggtccaaaaccttcttgtctaaatccattcacatcaggtgttttatgatagcctgcttcaacacctgcatcaaagaatgactggaataaaggattcgttgctggccctcgttttaatttaattggtccatcatggcctctaaatttatcataaggcgctgcaccgtatgttttttctaattttttaaaatacggtaaacagtgcgcaaaatcccaagtttccataccttctggttctgcccagccttcatagtccattggattaccacgttgataaatcatgccattaatcgaacttgatccacctaaaactttacctcgggcatgtgctactttacgaccgcccatatgtggttcttcatctgttgaataaatccaatcgtaaaatttattgcctgaagggaacattaacgcagcaggcatttggataaataaatcccaaaaataatcactgcgacccgcttctaatactaagacttctttatctttatcttcactcagacgattacctagtacagaacctgcactgcctcctccaatgatgacataatcatatgatttgtttttgttactcatcgttatgacctccaaagtttgttgtatttcaaagtgagcattgcatgaaatatttgttagtggctgattggttatcgttgaattgctaaacttagctaaccaaaacactcgattttccttttatgattgttactaacagtcatgaaataatctatgattcattttgcgtttagtccaaattatcaatcaacatatcgccacttatacaaaacaaagtgagtgtcttgtgttcttacaatggcactcaccttatctaatttttatttgctaaaccaattcactaattgtggatttgtatttgttaaaatgtgttttgaaacaaggtactcttctaagccttctttgcctaattctctaccgatacctgattgtttgtatccaccccatggcgcttgtgcaaaatatgggtggaaatcattaatccacaccgttccaagtttcaacttgttagcaacgcgttgtgcttttccaatatctttagaaaatacagcacctgctaaaccatatatagaatcattcgctaattgaatcgcttcttgttcagtttcaaagccttctacagtaacgacaggtccgaaaacctcttcttgtacaatacgcattgacgtatcacaatttgtaatgactgttggctcgaagaatagaccatcttttaaatcgtctctatctggacgtttaccaccaacagcaattgttgcgccttctgctttagctacatccatataagattcgattttattacgatgttctgttgaaatcactggtcccatttcagtatcagcatcaaaaccattacctaatttgatttttttcacgcgatcaataagtgcttgctcaaatttgtctttaatactgttttgtactaatattcttgatcctgctgaacaaacttgacctgcatggaaatatccaccatttaacgcttggtctaccgccaattcaaaatcagcatcatcaaagataatgtttggatttttaccgccaagttccaaggcaatattcgtaacattattagcagcatttttcataatatgcttaccagtctcaatgccacctgtaaatgatacaaggtcaacctctttatgacctgacattacgtcaccaacttcagaacctgcacctagaataagattaattgttcctttagggaaaccaacttcttccattaattcaaaaacacgtattgttgttaatggtgtaatttcacttggtttcataactagtgaacaacccgtagcaagcgctggcgcaattttccatgatgcttgtaataacggataattccaaggtgtaatttgtgtaactacacctactggttctttaacaattttgctttctgtatctggaattggtgaatcaatcatttcgccaccgtctttatctgctaatccagcaaaatacataaacacattatgaatatcatccatatctgcatatgattcttctaacgtttttccagtatctaatgtttctaatcgtgctaacgcttcgcgatgttctttgatcttgtccgcgatggcacgtacttttttacctcttgtttcagcagtttcttgcgaccattcaccagactcaaacgcacgtcttgcagctaagattgcacgttctgcatcctcttttgtcccttcagaaaccgtaaatatcacttcttgattgtaaggattgataatatctcttgtatttttattcgcgctttcaacccactcaccatcaatatattgacgctgagataaatgttttaaaagttccattcaacaacctccgttaagtttgttaaatttttatttaacgaattttacaaacttatgttagcatagaaatgaaaaatgtgtcaatttacaaaacaactcaagaattaagttttgtaagttcgttagatttttatttaacgaaacatttaactttaatgctttaaatatttttaatgtctttttttagaaaaggttttataatgtattagtatttattttaacgtgaccaaaatgatgtacggaggtgcaatgatgactcgttctcagaacaaacagcaacaattagaacaagcaaaagatattgtaattaattcaattggacagacaatggatttgtatggcactaatagaagtgtaggaaacttatatggcactatggtgtttgaaggcagtatgacgcttgatgaaatgcgtcatcaattgcaaatgagcaaaccaagtatgagtgctggcgttaagaaattgcaggaatttgatattgttaaacaacaatttacgagaggaagccgcaaacaacattttatcgccgagaaagactttttcatctttttccgaaactttttcactaaaaaatttcagcgtgaaattgacatcaatgtcgaagcagtaaaagatgctcaggctattatcaatccattacttgaaagcagtgatttaactgaagctgaaacacaagaggcacaaaaaattaaagctcagcttgatcatacacatgtttattacgaatggttagaacagttaaccgaagcgattgaaagcggtgaaattttcaaatatttcccaattccagaacagccttctgattctgaaaattaaaattgactctaacaacgacaataacaacaatagatacttaaaacaatgcaataggtgcacgaaataaacggtaacttctatctctacaaatagaaattaccgtttttgcttaatatgacaatcaatcatatacttataaaattcaaaatcttatgcatcattaattgaattataaattatcgtcttgttcttcttctgatacttgaacgattcgcaatgaacgacgttcaacttcttttaatttttcagcacgcgtttcaagtttaattctatcgcgtcctaaaatgattaaaaatgatatcatcatgaaaataaaaataacaattaatggcacacttgccagtattgaagcagttttcaatacttctaatgcacgttcgccaccaactagcatcaatgaaaatggcaataagcacaatgcaaatgcccagaataaacgattggcacgtaatggttcgcctaccacttttttctgagatgctgccgctaaaatatatgaacccgaatcaaatgttgttgctaagaataagaaagcagatactaagaatagtacaatcatcaatgatgggaatggtaaatgatgcaccacttcaataatggttgcctctgtaccatgtgtatttaaatattgtgttacattaaactgtccagaaatttgtaaatacacagcatagttaccaaaaataccaaagaataatacgcatccaagcgttccataaataattgttcctagcacgacttctttaaggcgtcgaccttttgaaattctagcaataaataaaccgataaatggcgcatatactaaccaccatgaccagtagaatattgtccagtcttgtgggaaattcgtttcttttcgacctttaataccaccgaatggttctaaccatgttgccatatggaaaaaatctctcaacatatttccgaaccctgtcactgtcgtttccataataaaaacagtcggtccaataataaatataaaggctaaaagtacaaatgatagccaaacgttgatatcacttaacttttgaataccttttttcaatcctgtatatgaactaatagcaaatatgaccgtaatcgttaataaaatggccgaacgtaaaatcatatttttaccatctaaaccagttaatctttctatgcctgcagaaattaatggcacacctaacgctagtgatgttgccgcaccacctagcaatccaaagataaataagatatctacaactttacctacaaatttatctgtttgaccttttaaaatcggacgacaagcttgactaattttatacaccggttgttttttaacaaacactaaataaccaattggtaatgctggtaaaacgtaaatagcccaagcaattggtccccagtggaacataccatattgcgtcgcatattggagtgcttcatcactcatacttttcgcgccatttggtggaacttgatagtaaaaagcccattcaataacgccccagtataaaatatcagagcctatgcctgcacaaaacagcattgccgcccatgtaaatgtattaaattctggtttatcacttgctttaccaagtgtgacattaccatatttaccaaatgcgatatacattacaaagcaaaaaatcgccagccccataaataaatatatcgaaccaattgaatcagaaatggcactattaataccagtgatgatatcttcacttgcttttggaaaagccatcataggtataactgcaaaaagaagtacagctactgtccctataaaggtcgtccagtccataactttctcttttttcaattgtgctccccctaattattaattttatgaatcctgtttcgatttatctcaaaatgtaataattatattgattcacaaaattgacaataactaatatttaataataatgcaaatttcatacaatttgaaacttagcaattattgaatatttatataatttttctcgtaataaacaaaactttaatagcgctaaaacaactgtgttaagttatgatttaacgaatttaacaaattttactagaacggtatttaagaatatttatacgttattggtgaatatttatttattgtaaaacgctaccaaaaagttagacttccttcccactaaaataccacttttttctttcaactgttttaaaaaacggatatgcaacttttagtattggtatcaaaatgattgttaggtcatattctatcaatatatttttctaaagaattgcttttattaactttcaattatgtacctaacctaaaaagaagccaaggcaacggatgttaccttgacttctaatacatattcaactaacaatatattcaatcatacgcgcatgcgagagtgattgttgtacatctataatgcgttgatttaaagaacctttatatggtaaatcaggtttgaataagtgttgtataaatagcccatctactaaaacgtcaatgtatgataataactctcgacgttctgtacaatcatttgctaaatattcatataaaaatccagtccatacccaaattgtctttgtatttccaaaacgtgctcgaaatgctttgacaagatttaatgtaatatccaaattacaaaatggttcgccacctaatagacttagcccagatatataatcatgatcgcaatcatctaatatttctgctaatatttcatcagtgtatttctcgccatatctgaacttttgtgaggctttgttgtaacatccaacacaattaaatggacatcctgatacataaacactgcatcttactccttcaccgtcaacaaagctatttgattctattttagcaatataaccttgtccttgtttaatgtctaaaagtgtcattctttaggcgctttcatatgttttactcgtgcgcaaatttctttatgacggcctttaattactggacgttgaactggattgcctaagtagccacatgttcgtttaacgacatcaactgttttaggattatcattgccacagttcgggcatttaaatcctttttcagttgcttcaaaatctccatcgtaatcacattcataacaatgatcaatcggaatatttgtacctaagtaaccaactttgtcataagagtagtcccataccgcttctagtgctttcaaattgtgttgcaatttcggatactcacaatagtgaatgaaaccaccactcgcataataaggataatctttttcaaaatctaacttttcaaaaggtgtaacatctttacgtacatcataatggaaagagttttgataatatcctttatctgtaatgtctttaatatctccaaatctctcttggtctaaacgacaaaaacgatccgttagcgattcactcggcgtactgtaaatactgaaccaaatgtcatataattctgtccatttcgtttgataacgtttcatttctttaagaatttcaagcgtaaatgcttttgcttcttgagatgtttcccagtctggaccatagaaaacagtagctgtttcgtataacccaatatagcccattgaaatcgttgcacgtttatttttaaataactcagcaacatcatctgtttcttttaatttatagttaaaagcgccacttttatataaaattggtgcgttattcggtacagcatctttcaaacgatttatacgataaagtaatgcatcatgtaacacatcgatacgttcataaaagatttcccagaatttcgtcatattaccggcagattctaatgccattctaggtaaattaagtgtaacaacaccaagattacaacgaccattattttcaaaatgaccttccgcatctttccaacttggtaaaaatgaacgacaacccattggcgctttgaaatcacctaatatttctacgagtttgtcataatttaaaatatctggatacatacgtttcgttgaacactttaatgctagttgtttaatgtcatagttcggatcttgcggactaaagttggttccttttttaattgaaaatacaagttttgggaaaatcgctgtcgtgcggtcttttcctaagcctttgatacgagtatttaagatagcttgttgaattttgcgacttaaatgatctgtgcctaagccgaatcctaatgttacaaaaggtgtctgtccattagatgtatataaggtattaatttcatattctaaactttcaatcgcatcattgatgtctttagtaacttgttgatcaacataacgatcaatttcagattctttgacaaattgctttgcgatatttctatgttgttcttcattatgtcgtgcatatgtactaagtaattcgtcaacgcggtcaaccgtacagccaccatattgactgctagaaacattggctataatttgtacaagctgcgctgatgcagtttgtattgattttggtgaagttacattcgcgttgcctatttcaaatccattatgtagcatatttttagcatctattaaacaacagtttgttaacggttggaatggatgataatctaagtcgtgaaaatgtatgtcccctctttgatgtgcatctgcaacgtgctttggtaataaatgatttaatgcgtaagatttagaaacgatacctgctgttaaatctctcattgttgaaaatgtatcactatctttgttggcattttcgttaacaatagcaggatctttagaaatcaaacccgttaatgcttcttcgatttgattcattttaccccttcttcctatatattgtgtctacccattacgttataccactatatatagtattttcaaatttttattagtctgttaactaaaacgtcacaaagttattaacatttagtgaaattcatatttccacacaattatttcattaatttttaaaattgtttaaagattcgtccgtcatttcgacatgtttatgcaactattatttcattttgtaacgggaccatagtttctattttttcatacttaaatcgtcacaatgcccatcaacattgcaattactaacataacgatggcgaatccccaaatccaaaagaatgcatacttaatatacgtgcccatgtttgcctctgctaaaccaattgccaaccataaggctggtgaaaatgggctgacaaatgtacctataatattccctatgaccattgaataagctgttgatacagacggtacaccaaattgccctgctgtttgttcgacgatcggtaacacagcaaaataataagcgtctgtgctagttagtaaatctaatggtacgccaagtaaacctacaataatatgcaagtatggtcctacttctgcaggaatcactttgattaaattcgtcgcaatcgctttaagcataccggtttcatttagtacacctaaaaacatacctgctgcaataatcactgcagccatcattaatgcattcggcgcatgcgctcttaatcgctccatttgttcatccactgatttaaaattaataacaagcgccaatgagacacctatcatgaatgcaaattcaggtggcgcaatatttattaacatcgctagaataacagctaaagttaaagctgtattcacccattttatccatggttttgttcgtgcacgtccttttacaggaaaccttatatcttgatctcgttcatatacttcaactaatttatgtacatctatatcttgtgtttgcggtaattcattgctagcaattgcttttttgatacgtttttgttctttaaatccaagatataccgcaaacaacataacaagaatgaatcctattatttgaataggaattaatccataccataattcattgacacttttggcttttaacactgcagctacacgtgccattggacctccccaaggtaccatgttcataatcgccgcgcttaatgctaatagtagaatcaataaatatttattcatatttaacgctttatataaaggtaataatgcaggaatagaaagcaaaaatgttaccgcacctgcaccatctaattgggctattgtgccaattaaagctgtcattgcacagacaatgacgacattgcctcgtgtcattaatattaatcgtttgacaagtggcttgaataaaccactatcgttcatgatgccaaagaaaataatggcaaagataaacataataacaacgttaatgacttggtctaaccctttagcaaaaaacccaaccaaatctgtcacactatatcctaaaatcattgcccctaagcaaggtatgattgtcatacctacaactggatttatctttttggcaatgagtaaacctacaattgaaataataataatgagccccattactgttaaccacaaattatcactactcatattattttctccctccattaaatataaaattcacataatccccatctttaacttaaatattataattaatataattttttatatttaagttatctcattttatcaaaaaaatcttttttgcgtaatagttaattcggatatctaatttttatgcagtatctctaatgactatttgaatccaattgattaatttgaatcttttcataagtatcatttttaatagcaatagttgaattctcggttctattacacaaaaaactggctaaaattagctattattcatagcaacttcaaccagtttttctaataacctatatatttattaagatttttcaaatcgtctatttctctatgttagaaattatcttacatatgtttatcatcttcgcttagaaattattagtatgcatcccatcttcatttacaaacagacatgttattacttcaagactgcctttagacggcacacagttattattttttatctaaccatgccaaaaattgagcttgtttagtatcgtttaaaaattctttcgtcactatttgtgataacaattgctgcttttcgctgtgattcatatcaagtacttttattttctgccggcaagtatataaaaagtcgatatacgaactgtatgatggtggatataacgcctcaagctctgccataattgattttgtcaacttaggactcgcaccatcagttgatacactgatagttagcttgtcgcggtgtagtgcacttggaaatacaacattgccatttgatgcatctccaacattattaaaaagggcatgctcaggtaaggcttgttttaccgcttcattgacacgtggctcattggttgctgcaatgactagatacgcatctacaatatcgcttggttcaaattctttctctttccatataacgacacctttatctaccatattttgaagtttttcagtgatttcaggactgataaccattatatgttcaatatattgacttaatgtttgtgcccgacgacttgcaacgacgcctccaccaactatgacgacatttttatttgttaaatctatcattaatggcatattcatgttgagcaacatcctttatataattttacatcattacaccttaaaatatttaacaccaatcgctaataaacatcacgttgatagcgttgttgttgtttcatttgtcgcaataataactctgcttcttcttgagaaatatgacgttcttttaccaatacatctttaatggcttgatggacatctttcgccatacatttttcatcgccacaaatatagattgctgcgccttgctcaatccattcattgaaacgttcactttcttccattatacgatgctgtacatattctttgtgttcttggtctcttgaaaatgctaaatctacgcgtgttaagtttccattttcaagccattcttctatttcttcttcatataaaaagtcagtactacggtgttgatcaccaaagaacaaccatgtttttccagtcataccaagttcttcacgttcttgtaaatatgctctaaaaggagcaattccagtacctggtccaatcataataaccggtatatcttgcttcatcggaaatttgaagttcggatttttcttcaaataaattggtactatatcgcctggtttaatacgctcagcaaaatgaaccgagcatacaccttttctctcacgtccatgtgcttgataacgaaccgtaccaacggtaatatgcacttcatctggcgttgccataaaactactagaaatcgaatactctcttggtggtaattttctaaggatttgatacatattctcaggctgtaattctatagttggaaaatctgttattaaatctataaagtcccgatttataacatattcacgcgcccatgactcatcttgaatacgttcagataattcttcattgtcaaaatagatatctgcatttttcaataatggcaatgttaatttagtaaattcaaaatgtgatgttaatgcttcaacaataggaactgtatcaccatgatcattaattggcaccggagattgcggatcccaacctaacatggatattagtttttcaaccaattcagggtcgttttgcggtaatgctactatacaatctcctggttcatatgattcactaaaatcatcaagtaaaaattctatatgtcgtgtttctttatttgaatcggtaccatttaaattgatattcgctaaaacttctgcttggtatggatttgatttagaatatttcttttctttggcagacttaattgattcacttatcaccgattcactttgaataccttctgatgtggtatcaataatattaatgatgtctgccatccacttttctgcgtcttcttcataatcaatatcacaatctacacgcttacatatacgctcagcgcctagattttctagtaaagcatctacatctttacctgcttgacagaaaaattcatatgtttgatcacctaaagctagtactgaatatctcacatgatttaaattaggtgcgttatcgtcttctaaaaattcaaagaaatcccatgcattatcaggcggttctccttcaccatgagtagacgtaataataaataaatcttctaactgtgcgatgtttgtcgtatcatattcatccattgacatcaaaacaacttgatgtccgatatcacttaaacgttctgaaaaaatttcagctaaacgcatggcattacctgattcagaaccatatagcactgtgacatgccgctgattagcttcgatatgtggctctttattttgtaacatatacgttgttgaagttgcttgttcttctgatatttgtgattgttgccacacttctgtctctaattgttgttgattactatcacttatcgtatcgttactattagctagtaaaaaaccactaagccactgttgttggctctctgttaatgtttgcagcagattgttaatctctgtgacttgtttttctgtgaatggactattagatgtatttaatttcaaatattttcacctcaataaacttgaaatagatgattgactcattttttatcgatagttcagtcaattttttaatatgtatggtataaattaaaacaaacttgagttgtgtctgatagttatacttacaaatatttacaaccttcatgttgcttgaatgacattatcagtaattcagacaaaactttgattatgtcgtgtcagtcattaatgcatacagtaatgcatcgttgttattttttatttatttactatttattatgtaccaaatcagcctttcagtaaaataggtcaaattactgattttctaaatataaaatgcctcttaatgacatactattagtacatcattaagaggctcttgtgttatttgcatactaagcgctcaattttaaatttaagatgaagattcttgcaataatatttctatatttgccgatatatccaatggatcttccattggcaagaatcgatttacaacattgccttgtcgatcgattataaattttgtgaaattccattttattggggacccaaagattcctggttgttcattctttaaatgcgtaaataacggatgttcatcgttcccgttcacagatattttagctagcactggaaatgtaacaccaaatttctcacgactaattttcaagatttcttcattagaaccaggttgtcgattgtcaaaattattattcggaaaactcaacactacaaacccacgatccttatatttttgaaacaaagtctctagttttttcaattgttcgctatatatacattctgttgcagtattaacaactaaaatcactttacctctaaatgcttctaatttataagttaagcctttataatcacttacttcgatatcatacacatttctattattcataagacacccctacacagccttttttatattgaatatgttctttttagaatgttctgataaaataagtgcgcgtttataccgcgaacacacattatatagcgtgatacatttttcgagcacacgataaataatgttcgagtttatgttgttgctcaacctatccgatttactgtcttttttcacctgtcttactttattaaaataatcacattgtatagctgtattagtccagctacaatatctttcgttataacccctcattataatcatccttattttctatttttaaaaagacaattagaccgctctttaaactatagattaatacttaagttaaactcatacatactgataccatacgttaaatctaacaatttaaaattcgttataactatggattaaagagctgcccaactcatataatccttaaaaacttcacatgtgattgtttattaagccctcctttatcttattaaatatccttatagcccttttaaaattaaactgacacactcatacattgttacacgcgacgataaacgtcatattattgcatatcattaaaacaagtcactttgtatcgtgtgcgaccgaatacatattaaatcatcaataatgattattcaattattaaaaataaaaacgaacattctatatagagtttccacttattgttttttcagcattgtcttcattacttaacattcgtgattgtaagtaatattgaccaccaatatttagatactttataagtatgccattcatcatttttaatcatattatttttcatattgatatttctattcatatatttctgattgtatatttagatataatcatttgttattggaaaatatatgaaacaaatttgactcatctttttcaatatctaaatgacacgatacatgatttttgaattttgtaattaatttacttttaaattagactgaattgtgacaattttcaaacattttaatgtgtaaatcattggcaaaatatacgaattgcatttaaatcgtcaatttacatatatttttgcgtagtaatcaatcgttatcattgttatttatcgttacattatttcgagtatcagtatgtatttcgggcttcgtttgataacgacatttctttgtgacatcgcttcatcagtgtaacaacaaatacaatgatttcgtgatgttagttacccattttatgtgttgcataaaatatgttgttataaaacattttaaatcattttatataaacaagctatatatttttgatatttcaaaaatataacttgtcataaaagtaaaaaaaccgacaagacattgtatcttatcggttaaaatttgttattgttatttgtaatgtttttaggtttctttttaatataatatatttcagtgaaaatacatgattgattgtgatttcactgaaacatggttaattacgttgttgatgaataactttagcataaatgtaggaagttattttgtacatcgccatatatagaaacgaaattataatgacagctaatacgtaacttgttaaaaatatatgatgattattaatacctaacatatttagtaacgtatatacaatgttactagaaattaatgtatgaatcagtgctactgttattggtattgcgaacaagaaagtcatttgatttcgtgttatctttgatattctcccattatctaaaccaagttttttcataatgtcataattgtgctgatttgcataggcttctgaaacttgcttatagtacatcattagaaatattccaatgacaagtacaattgataccacgccacctacaaatattagtccacctgtcagacgatcccaaaccattagcatttctgatttagaatttattgatgcatcgtactttttcgatagcttttgaatttgtgatgttgttaatttcgtctttccagatacattaaagtttatcgatattgtcgaattcttttgttcatgtgcataaaatccttttactttttgtaattgatttttatctttaacaattaaaaccatactatcttgaatcatcatcaaatttaacgcatgtgcgtcaagttgtttcactttaaagacttcattattaagaccgaccttagactgctttttaaaaataggtacattcgtaatcatacctatactttgattgtctaagtgtaatttgttttggtgatatcgattataatcttgtacagtaagtgctgtgatcattactgattgcttagaaaatatcgagccttcattaccaatgaagtctattggaatatcatcactagcctgttttaacttgtaataagcacgattcttttctaaagaagctctaaataatgtcgtttcatatactttgaagtcttttgcattaaccgaaccctgtatatcacgtttaatattctcaatcgtttgttgacgttctatttgtgacttagaattgtcgttaaatgacaaatcataatcattggtaatcaatttcataatggtatgattcatatcgcgataggttgttaatgtcattgtgagcgttacaatcaaaaatgtacacagcaaagtgattgttgcaagactgactgcattcattttaagacgtacacgcatcccgactactacaaaaaaataccgtggatgatagtaaacttttgatacctgctgcaatatactaataattatttcacttatacctacaaaaaatgcataagtaccgataataactaatcctatgacaatccatattttaaaaaaggcaccaaacgtcgtatcttgttgtaatgcaataaagtagcctaaatatagtgctgcgcttcctataacaattaaaacgtaacgcaaccatcgtgatatgacactggaatcggaacgatgttgataagttatcggtcgttgaaaattaatactgaacaagttgaatataagtagcatgcccattaatacagcaatgataatcaaagtaataaacatcgctacagagtcaaatggataataccttaacgttgcaacttcactgcccattattttctgtataaacaagaaaaatatcgcaccaagtaagtatccgccggcaatactaacgactgaaattatcataaattgtaagatagtttccatcactacaattaaacgcatacttttcttggtcatgcccaatgtcataaaaatgctaaactcttttcgtctttgtgacatcataaagtgatttgcatagaaaataaaaataaaagttaaaagcgccataaaaaaattagctatgataataaatggtactaggaagtcattcttctgttttatgtagctatttaatccaattgacacaagcgtatattcaatcatgaatagtacacttaccgctaaaatgaatggaatgattacaagtcgctgcgtgataaattgacgtcgcattatgtgccataacaatcttaacttcatatattgacacttcctccattcacaagtgctaagctatctgttattcgttgttgaaaagctaattgactttcttcaccacgatatatttcatgatttagacgcccatctttaataaaaatgacacgctctgcataagacgcatcgatatttgaatgagttaccattaaaattgtctgttccaattgatgaatctcttgaaataacatcatcaatgcctttgatgtttttgaatcaagtgcacctgtaggttcatcggctagtaaaatcgtcggtttagtaactaatgcacgtgcaatggcaatgcgttgcttctgaccccctgagatttcagaaggatatttgtttaaaaatccctctaaatgtaattgtactgtcagctgatggaccctttgttctatatcttttcgtttagcaccagctaaaattaatggcatcattatattttctttattcgtcattgttggtaaaagattaaaatcttgaaaaacaaaacctaccatttgttgacgatacaatgctttacttttatttttcatattatttaaatgtgcgccatccacaataatgtcaccttcagttagtccatcaaaagaagcaattaaatttagtagtgtagacttccctgacccagactcacccataattgcaacaaattcaccagctccaactgataaattcatttgattaagtgctgtcgtagcattcaaacctttaccataaaccttttttacatgtttcacttctagcaacatggcatgcacctcatttctttgttagttctatattaaaacaaaaaaatactaataacatttaaattagtgaaaaaatgttactagtatgcttacaatattgaaagtttttattcatctggaaattgaatcgtaaatgttgtaccctcattttgtttagatacgactgaaacaggatggtttgtgtgagttgaaatttgttttacgataaataaaccaatcccacttgagttactttgccgctggccattataacctgaatagcccttatcaaatattttaggcaagtccgcttcactaataccgataccattatcttttacgtataattgattggattgctcatcaaattcaatccatatatctttacctctcgcatacttaagtgcattatttattaattgttctatcattaaagaggtccatctaacgtcagttaatacttcgtgatgacaaggttcataatggatttttgttttttgatcaataaactgtattgaatatttcataataattgggcgaatgatattgttaatcgaaattttagtgacagaaatatcagaagtttcatttaataactttaaataactaagtgctaaacttgtatagttatcaatttgaataacctcttgacgaacacgattcacaacattaggctcatctctttcaagtaacagttgtgctgcagtaatgggtgttttcatttgatgtacccatgttaaaaagtagctctctacatcatttttatattcaatttgttcatttttaagctgatacaacgcattttctaagttttcaatttgttgttgttggcttatagtttttaaaaaacttaaatatttaatacctataaatatgagtaataataataaaataacgccaagtgctagtaaatatgcttctaatggcaaatgatacaggtaaaacattaagccaaataaagcaaaaataactatgactattgctatttcctgagtaatacttttaagaaaggtcattgcattcaccctatactttatatccgacatttttctttgtaatgataaaatcattaacgccaatagtatttaattttttacgcaggcgcgtcatgttaacagctaatgtattatcatctatgaagttttctgattcccaacatttttcaattaaagcagttctacttacatatttatcttcattttgaaataataactttaatatttgtaattcagtcaaagatagctgtatgttttgttcttgatacacgacttttgcttcatctaatattaatgtacaacctttaaccgtcaatgaatcattagctactgacaagtcataagttcgtctcaataatgcttgaattttggcaatcgttaatgacaagttaaatggtttttcgataaaatcatctccccccatttgtattgccataatttggtccatattatcaatacgggaactaataaatataattggcacattagatgtttttcggatttcttgacaccaatgaaaaccatttaacgttggcaaattaatatctagcaatacaagctgaggttgatgttggttaaagatagacagtatatcatcaaattgttcaacgacaataacaccgtaattccattttttaagttcagatgctaaactttctgctataacaaaatcatcttcaacaattaatattttcatctataatcttcttccttcaattgaattatcctttgtcatctttttgttctttagcctgctgcaatgacggctcttgatttgaactttccgtgtcatttgtattttgatttagtgtatttgctttttctttctcgagttgctttttcttcgtacgtttacgctcttctaaaatagacaacactataaagaatatgattaataatggagataacattactagtatcatttttccacctcaaattatatttaattctatattttcacacgcttctattctaacgctttctataacaaattgtcatatatattcattttttgttattctaaatcactctgtttacatatttttaactaaaactacataattgctcaaaattcctcttttacactgaagacatagtcatatactcaggaggatgtcttatgttatcaattaaaaaagccacaaaatttgcagttgctaaccttattatcgtgtcaacagtttttagttctgtcacacctgcaattgcgcaatccgataaaagtactaaagatgaaagtttcgcggttggtaatactaaaaatccaaaaaatgttatctttttagttggcgatggcatgggcccatcatttaacacagcttatcgttattataaaaatgatccgcatgctaaagaaatgacccctactgcttttgattcatatttaaaaggcacaaatcgtacatattcaaatgacccaaaacagaatattactgattctgcagctggcggaacagcctttagttctggtcataaaacatataatggtgccatcggtgttgacagtaacaagcagaaagtaaagacggtgcttgaacgtgcaaaagaaaaaggtaagtcgactggtcttgtttcaacagctgaattaacagatgcaacaccagcagcatatgctgcacacgtgacttctagagatgataaaaacgaaatcgctaaacaattttataaagataaaatcaacggaaagcataaagttgatgttttattaggcggtggcgctaaatatttcggtaaaagtaatggcaatttagataaaaaattcaaaaaagatggttacgatcttgccacgaacagtaaggagttatcaaaatctgataaagataaagttcttggtttgtttgcagataaaaatatgccacttgcaatagatgcttctaaagacgaaccatcattagctgatatgcaacaaagtgcacttagtaagcttgagcgtaataaaaaagggttctttttaatggtcgaaggtgcttctatagataaatcagcacattctaacgatattacaggcgttatgtctgaaatggaaggttttgaaaaagcgttcgatgacgccattcaatatgctaagaaacataaagatacacttgtcgttgcaacagcagatcactctactggtggtctaacaattggtaaagataaaggatacgaatggaatcctcaaccgattaaatcgatgaaacactctggatcatatatgacagaaaaaatggctaaaggtgaagaccctgaaaaagttattaatgaaggttatggctttgaattttcacaagatgatatgaaaaaggttaaaaaagagaataaaaagctaaaaagactacttaaaaaagaaaaagacgaaaaatccgcagatgtagaaaaacaaacaaaagccttacaacacgcaattcagaagccagtaaatgataaatcttatacagggtggacttccgatggacatacaggcgaggatgttaatacctacgcttatggacctagatcagaatcatttagtggtaatatcgaaaatacagaaagcgcaaaaataatatttgatatattcaagtaaagcataaaaaaattcccgagcactacaacaaggtgttcgggaattttttatggtttaatttagtactcaatgttaggtgcttggttaacacgttcttggtattttttaaatgcgaagtataaaccgccaactaatgttaaaataactgctaattttttcatcattcaaactcctttctaagatgtgttgaaactgagttcaattaaattatatgtttttattatacactttttgacatattttttaaatttaagaatgcgaagatttttaacatttctgatgctagctttctttttcatctttcaaatgcttaataaaatcaaagccaggtcgccctttagccaatgcttccatcacatcataccaatccgaaccgacttgttgatatatattttgcaataattcatcttgcgccttgttcaattcagcaatgagttgatcgcctttatccgtcgaatataattttttgacacgtcgatcagtctctaaaactttttcaataatgagaccttgctcttttaatttttgaagtgttgcatgtgatccttgtttagaaatttctaatatttctagtaatgatttaatagtaataccaggtaatttattgataaaaaacaaaaaacgatgatgctgacgactcataccatacttctctataatttcatcagcggtagtaataaaggttttatatgcaaaataaaacaacatatgctcataatcgtttttattggtcgacatgatgatgactcctttcaaagcgttaacctcattataataaaatttataatgtaagtcatacaaatgatgataaaactataagctaaatctaagtttcacgagaaacatttttgtgtatcagcaaattgcgccaatcatattaatacaaaattaatttaaacactcagaaatgttagtcgtgagtaaatagtttgtatcactcactctgtttatttaatgcagccacatattttccaagaaataattaatcattcaccatccatgttatagcccgcttaatcgcttggtcccaatatgcataatcatgatctcctggtccatcttcaaattgataaggaacatttttgcgtgataaataatcgataaaatctaagttgtcttgatataaaaagtcttgtttaccacacataatgagcaattttggaatttgtttatcttcaactacagctttgtctagcaagtaatacggatcatgttcagttcctttaacacttgaaagattgccaattatggcttcttttgaaaaatcattccactctagatccattaaattttgcgcttcaaacacagcagataatggtacagctttggcaaatttatccccttgtgttaatgcaaatttaattgtgccatatcctcccatagagtgacctgcaataaaattgtcatcacgctttttggaaagtggaaatatttgatgaacataatcatatacttccaaaatataatcataatagctatgaccatatgccatgttagcatatgcgctatgatccacattgggcataatcacagctaatttgtgttcattcgcatacctttctatgcttgtatacctcatatatgtcgtttcatcacttgataatccatgtaacaacattaaagtttttaatggtttagcagttgtatcgttattaaagaagctttgatcttccggtaaaatgactgtcaaattttgatgcataccaattgttggtgaatgatagtttaatgaaatataagccatacgtcatgactcctttctaattctactttatcaacattttacgcttaaacaattcactttaaaatcattttcaacaaaaaaaaccgaatacaaatgtattcggcctgaaaaaagtatttacgctttttctttatgatcttgcttgcgttttctaaacaatagtaatgatcctaataatgccatcattgcaccaaataaagttgcatttgtgttttcgctcttatctcctgtttctggtaaagcatcagttttgtgttgttttgatgccttattagaatggtttacttcacctttaggatttgatggtgctttctgttcattatttggtggtgtaactcttgaatcagagtcgctatctgagtccgagtcgctatctgaatccgaatcgctatctgagtccgagtcgctgtctgaatctgactcactgtctgaatccgagtcgctgtctgaatctgagtcactatctgagtctgaatcactatctgaatctgagtcgctgtctgaatccgagtcgctatctgaatccgaatcgctatctgagtccgagtcgctgtctgaatctgactcactgtctgaatcagaatcgctgtctgaatctgactcactgtctgaatctgactcactgtctgaatccgagtcgctgtctgaatccgaatcgctgtctgaatctgagtcactatctgagtctgaatcactatctgaatctgagtcgctgtctgaatcagaatcgctatctgagtccgagtcactgtctgaatccgagtcactgtctgagtctgagtcgctatctgaatccgaatcgctgtctgaattcgagtcgctgtctgagtctgaatcactgtctgagtctgaatcagaatcgctgtctgaatccgaatcgctatctgagtccgagtcactgtctgagtccgaatcgctgtctgaatccgagtcgctatctgagtccgagtcactgtctgaatccgaatcgctgtctgaatctgactcactgtctgagtccgagttgctatctgagtccgactcactgtctgagtccgagttgctatctgagtccgagtcactgtctgaacctgagtcgctgtctgagcctgagtcactgtccgaatccgaatccggttctggctctggatccggcgttggctccggttctggctctggacttggttctggttctggacttggctctgggtcaaccggtggccctggagttggatctttcggatttactgctgaatcaccatcagcacttccaccaccataacgtacaacattctcattattccaaccgaaaatactgtagtctttacctgtcgctgggtcaatattttcttgaataacctgtgttttcaagtttttaccagtattatcatagtgaccttccactaatacaacatacgttttagtaatatcaccaaaattaatacttgctacattttggtatttataagtgattttatccttaaattgatcagttacttctttaagattagagtcatttgggtctgcatagtagctatctgataatttagatgtatcattcacttcaaaaattctcagttttgtatctgtagcacttactttaccgctactttcttcgattttatcttggtaacctttaatatacacccaggcattacctaaaactcgttgcttagggttaacaaataccgtttgcttgtatgtgttttgacctgaagctgtatctacaccaataatttgagaagaaatgttcgcgccatttggcttatcaattcctgcaattggtgaactatagttataagtaatttgattgttaaacatttcatccgcaatattaatatttgcatcatatgttcctgatttaggtgcctttgctctgtctgtaaataatggtaatgaaaatttcccattaatattttgcttatcatttacataatctgtaaagacaaatgtatatgtcttagtcaaaatatcatatgtcgcttttgctacaacttcatttttatcgtttactatatctgcaattggcatcgtattattcgagttagagtaatccacgtctccattaccagttaaactttctggtaacttcgctgtaaaataatcccctgatttcactttatctgtcactgtaaaatttgccgccataaatgtgttaccactttggttagggtcaaatgtagtcttttgcaactgtaaatcttttgcagtaactttatcatttacatttgtacctttagcatcagcagcatttactacaggttcagcaactgcaagactacgtacagctctcgttctaacacttggtttactagttccttgcgcattggaaatcgtttgtggtgatgattgtggtaaatctaatgtttgaggatttttaagctcactgtttgttgttatgctattagcatcattcgttgttttattatctacttgagaatttgcttcttgaggaacagttcgatcttgcatttttgcagcagttgcttgatctttaattgccgtcggttgaggtgtttcatttgttgaagctggctctgttgtagtggtattgctcgtttgtgtagacattggttttgctgttctatctacattcgcactgtttgtgtttgcactaatatcagatgtatcattagccgttgtatttaattgaggtgtttctatcgtattgtttttttcggaatctgcacttgcattatttttcgaagattgcgttgtatcgttcgattgttctgaagcttgtgcttgatgattgcctatcccaaatagtatagttgcccctactattactgatgtggtacctactgtaaaacgtctaatcgaatacttattctgcttattcgacaaataatcaattctttttttcaaaaatattactccatttcaatttctagattagtctaaattgtataatgaaataagaattatatcaattgcttttcgaaaaaaattatgtaaaatttgttttcttcctatttatataacttaaaattttctgttaactagcaaaaatcaatatgctatttttacactattgcaaattttttacttttcaaaaacttagaagttctaaatttttcatcaccttaaattttactgtaatttcaacaatcaaatttaactaacatattaaattaatcatcacgctagcaaaaaaggcctaacgtataaatgtacgttagacctcatgttcaacttattcattttacattgtatattaaacacatacatcattgaataaatgtttgcttactaaccaatttttatgatctttaacaacaagtttttcatctttaagttcatgaataatatgaccagctgtttcccgggaaatcccagccatatcactcatgagttgaatagttaaaaactgtttgatttcataaaattcatcttgatcgtatcctactgtctgacatagatggcataacaatttgacaattcgatctttagcaaatttacttgttaatgccatgttatagttcatgtgttgctgctcattatcatttattaatgcaaaaagtgtcaaaaatatatcatcattagctttgcacaaaaaggccatcaattctctaggcaatccaagaactgtacaatcggttaatgctgtacacaattcgttaacctctttcggatgaaataagttactgattggaaataatacttgctctttattaaaataacgatatacatctccattttgattgtaatgttctctaataatgttaccttcaattaaaaagtaaatattgctactttcttgtggcgaaaaataaataacttggcctttcgtataatgtctgacaaaacattcactttgatatggttgtaatatactatatgggatattaatgtaatctgctaatgcctttagttcatgttctaatttattatttctacccaaaataaagttttctgtcataagttaaactccttcaaaccttgcaaagtgtcagcagacaactttttcatttgaatcaacggagaaacatatttaatgttttgtcgcgtgataaagtgctacatgtgaatgtgtgtacctttattaccaatcaaagcttcgtatgcctgctctaaattggtaatgataacttttttgttttccccactttcaacaaatcgtatcgcagcttctatttttggcaacatcgatccttccgcaaacttaccttgtgctgcgtattttttcagtgttgctacatcaatatcatctatttgttgttgattaggttcattaaagttaataaatacattttctacattcgtaagaatcattaaggtatctgcttcaatcagcgttgctaatttctcactagcaaaatctttatctataaccgcttcaacaccttcataggtattttctttttttataactggaataccgccaccaccgcatgcaatgacaatatttttaccgtctgctaaagttcgaattaactggtgttctagtatagattgaggtagtggtgacgcaactacttttctataaccacgtcctgcatcttctttaaagactgagtctggctgttctttttgtaattcttcaacttcttctttcgtataaaaaggaccaattggtttagttgggttatcaaatcgtggatcatttttatctacttccacacgtgtaacgattgtgcctacagttctatcactattcatttcagttaaaatgcgattgatttcagtttccaaccaatagcctatcataccctgtgacattgcaccacaagtatccaatggcattgccggcgttgtgtcactgttcgatttagcttgttggattaataaacttccaatttgtgggccattaccatgtgaaatgacaatacgcgctggtgaatcaaataaaggtttaaggttttgcatcgcacgtctaatagctgtttgttgtgcttcagctgttgcttcttttgtctgtatcgcattaccgcctaatgcaatgacaattttctctttcatatttttgtcgctccttttaaaaaacatttatcgttcccatcaataacttaattaacccgataactgcaagtacgataataatcataaaaagaatatagtctgatttaatcaaacgtgtctgattattcttttgaacgattgaataaacaagaagagctggaatataaagtaacatcgtcaataataagtaattgatacctgctgcatatataagccatatagcataaattgaggctatgataccaatcgtccattgtttagtagttgcttgctgtctatgctctaaagtgtatttaacttggtaaaatgcactgaacatataagggtataaaatagcacttgatgctagtgaaaatgcaaattgatacgcactctgtgtaaatagcatacttattaaaaataattgtactaatatattggtaataagcagtgcatttacaggtgctccatttttattttctttagcaaaccattttggaaataatccatcttttgcaacaatgaaaggtaattcaccagcaagcagtgtccatcctaaccatgcacctagtaccgaaataattaaaccaatatttacaagtgtagatccccaaccacctacaatagttgcaagcacctgtgccatacttggcgaatctaattgagaaatatgattttgcaaaatcacgccttgagctaatacagttaataagaaatagataattaaaactgatataagtcctataaccgtggcactacctacatcttttttatttttagctctactagaaaaaattactgcaccttcgataccgataaacacccatactgtcactagcatcgtacttttaacttggctcattgtgctcgcccaactaaatggcaatacaccctctgacgtcataccgaaaaagcctgttttaaaagtgtcaaaattgaatgcaattatcatgcatatgattacaagtaaaatcggtattaactttgcaacagtaacaatactattgataaatgctgctgtttcaacgccttttaaaatcaagaaatggacaccccagagtagtaacgaggcgacaataatacttggtaatgtgttgcctcctttaaaaatcgggaaaaagttacctactgctgacatcaatagtgttgcataggcaacattgcctaaaaacgctgagaaccaatatccccaagcactgataaagcctacaaaatcgccaaatcctgcttgagcataactataaataccaccgtctagctccggccgttcattggttaaattttgaaatacgaacgctaatgaaatcattcctatagctgtaataatccaaccaataataatggctaatccaccggctttaccgcccatatcagacattatattgaacgcaccgccaccaatcatggatcctataactagtccaattaaagaagatttactgagtttgttatctcctgattcgttcatattcatttctcctttaataccaatatgaggtgtctgtacatgacacttatatcatcagacacatcatattcatatcgttccatttagtgattaactccccaatgttgctgccattactgccttaattgtatgcattctattttcagcttgatcaaacacttttgaatgttcacttctaaagatttggtctgtaacttccatttcagctaatccatatttttcataaatttcttgtccataaagtgtatttgtatcatggaatgctggtaaacaatgtaagaatatcgttgaatctttacctgttaaatcaaacatctgttgattcacttgatagtcttttaataaattaatacgttgttcaaattcactttcttcacccatcgatacccaaacatctgtatatatagcatctgtattttcaactgcttctgcaatattatccgtaatcatgactgaaccaccatattgactcgctttttcttttgcaatatcaacatatgcctcttttggatttaatgatttaggtgtacaaattcttacattaacacctaacatagcacctgctaccattaatgaatgcgcaatattattacgtccatctccaacgtaagttaagtttattccttctagatatccaaaattctcttttattgtcataaaatcagctaacatttgtgtaggatgccaatcatctgttaatccattccacaccggcacaccagagaacttcgctaaatcttcaacagcttgttgtgaaaaaccacggaattcaataccatcgaacattctacctaatactttcgcagtatcctctacagattcttttttgcctaattgaatatcatttttccctaaaaattctggatgcgcacctaaatcaatagacgcaactgtaaacgctgcacgcgttctcgtcgaattcttttcgaatagtagtgcaatattttttccagataagtagtgatgcttaataccgtttttcttatactcttttaatgtaattgcaaaatcaataagtccttcgaattctgctttggtaaaatcactttcttttaataatgatctgccttttaaatcatacggtttttgaatttctgtcattattttcaccctcgtttctataatttattacgttaaatgtcttctctgaatagtggttgactcatacatctaggacccccacgtccacgtaccaactcgctaccagatatttcaatgactttaatgcctttctgtctcaataaatcatttgatacatagtttctatcgtaagtcactacaacacctggtcttatgcataatgtatttgagccatcattccattgctctctagcaccatcaatgacatcaccatttcctgttggaatgaattggatatcatctatacctagtacgtcttctaaagtatcttttaaatgactagattgtttgatggcaatatctttatttacgtcatcatattcaataataaatatattcatattgccttctgcctttaaaatggctgaatgcattgtaaatttgtcataatctatcattgtaaatactgtatctaagtgcataaatgttcgactagttggaatttcaattgctactacttttttaaacgtcgcctgcggattttcaaaaatacgtcgcgctaacttttcaatagcttgtgcagatgtacgttctgaaacgcctatagccaagacatctttagataaaacaagttcatcgccgccttcaatattgaatgggcaatctcgatctaaccagattggaatattcgcatctttaaatctaggatgatactttacaatatattgaataaatattgattctcgtcgtcgtgctctccagaacatccgattgattgttataccgtgtcctattgaggcttgtggatctctagtaaaataaaggtttggcattggatctaaatagaatggatacttatcatccatatactctactagatgtgtacatttcggattaatttcttccttacgtacccctgacattattttatctacaagttcttgattagaaagtgtcgcaaataatgccttaatttcttcttcatgacctaatattgtttttttagactctgctaatacatcatcaataaattcacttcttacttgaggattttcaatactttcagctgctaacttctcaaggtaaagtacttcaacaccctcttctcttagcacctgtgcaaaatggtcatgctctttttgagctacttctaaatatggaatatcatcgaatagtaatccatctaaataatcaggcactaaattttctaattcttttccaggacgcttaagtaacacagtttttaaagctccaatttcgctatttactttaattggaccatctgtcatgtctatttcctccttttatctttgaattcatttagagtatagacaatcttcaaacgcttacatgtgattatattcacataaagaaagtcgaaaatttcatatctttttgttatacaatacataataatggatttttatacataaataaaggtgttttgggtcgaaatatacattttttattcaaaaatacccacaaaaacatgttgtataaagttttttatacagtcaaatgaatgactatgaattctttctttccataaaaaaacgcgtacacaagttaatattcggaaactaacttgagtacacgtgatacgaaacaaatttttattattcatttgatacatgtctatttaaataattttgcgtatacgtattctgccatatcatttgaggcagttaagattaatgtagtgtcatttccactcaccgtacctaatatctcttctatatttagctgatcgataaaatagtttataccttgggcgaaaccaggtgaggttttgacgataatgtatgaaccattgatgattgaacttagaacttcatgttcacaatagtgtctaaacttttctctcatctcttgttctgtttgattattaatagctttataaatccatgtctcacaatcgatagggacacgatatatattaagttctttcaagtctttagcaattgttgttgcactatatcttacaccaaaatattcttcaatatatgaaatgatttgttcttttttataaatcttatgctttttaactattgtagaaacaatttctaatcgtttacttttcttcatattgtaaactcctttggtagttacgtttcttgtattaaaaaataaattcatgcatgtttcatttataatttaacactttgttttgcaaaagataataaaaatacatgtaaattttttgtgacaacttttaaaatgaattttgtattctaagtcagcatttaattatcacatatttactactagtaatgattttagactgccgagtagtctttcggcagacaaccctcacactcctctcatctaattacaaaaagagggtacacctacaaagtcaattatcaatgtaggtataccctatatataagctgtatttaaaatttaattatttataagtgtttaacattacttcttcttgtttatatatttttactccacgcctacttcattccatgcttcatacacctgttcagctgtttgctcgtcatataaatctttagccgcttggtataatgcatctttacaatctttgaagtttgaattacttgttaagtattccgttaatgctcggtagtaaatttgttctgatttagatttccctattgcttgaatcacgttataagctgctttatttggaattccagaattcgtatgtacgccaccattatctttttcagtgaatacatagtctttcatatgagctggttgaccaaattgttctgggtttgacatgctgcgtaaagcgtctccctcttttccaggtgtgtagacatcttcacccattaagaaatcctcgtcatctacaaagtatccaaaaacatctgaaaagctttcgtttagagcgcctgactggtccttatattctaagttcgcagtctcttgtgtcacaccgtgtgttaattcgtgtgccactacgtcatttgcacccgataaacttgtgaatgtgcgaccatcaccatcaccatagatcattttgtcaccaatccatgcggcattatttctgttatcttgaccaccgtagttattaacatgcgttaatgaaacaattggactaccttggttgtcatatgattcacgaccaaatgtgtctttgtaataatcatatgtttgtttagcgtaataatttgcatctacgccagcacgttgctcatcttttacgaagttttcatcttcattagtaatcaatgttgcttgacctgtttgatcattaaagctaaatgctgataatttaccttgatgcgttaaatcttctaggctaaatccaccgtcaatactattgatattaatatcttttgtatcgccaagtacaccttttcctttaccagtttctgcagcttctttaactaagttcattttttctaaaatttcgccagtttgagcatcaattttaactttccaatgtgaaatttctggtgtcactgtaattaactcaacattataaacgtatttattactgtcaccatcgatttcaactttgttttctttaatgactttatctttaagatttttcgctttattcttatcaatcttaactgctttaaatgctttgtcggctgcgtcatctttacttaatgtcactttattcgttggctttactttcttcgcatcagtatccccattgattaaaacgacttttcctgatttgtctgcgtgtactttcacttctttgtcaggtgcatgaacaccatcaacactcggttgcaatgtgtaatgcgtaaatccttttttatcagtttttacatcagtaacagcgtaatcttgataaatattttttacattttcggatttaggcaattcttttaatgctttgaccgcatcactcttttgagtcacctcaaatttaatatcagaattagctggtttattgtttgaatcaatcgctaatgctgctggtgataaagtgctcaacaaggttactgctgccatacttgtaaatgcatatcttgaaaatttcctcacatttcattcctcctgaaatcttaaaaacagcttataaataaaatattaatttaatttttcggaaaagtaaatgattatttctatttatttcgatactttttgttcgttgattttatttattgatttttttcttttttaaaaatgttatctgtggctaaataaaattttaaaaattgagcttaattatattttaaaatttatcaaggctttatttttgtgaaaatattaacaaatacaaaatagtgctctatatacttaatcaatgcttgaaatatgtgagataactatttaaataagcatgatcaaataaacatttttatcaatttcaaacaactatgtaagacgcaataatcgttattatttaataaaaaagactagaatgcggtatcactcctcacactctagccttaatatgctattattttatttacttgttttgtatggtgtatgtccaactgttacttcgacaactctattatgatcaacgacaaaccagatgcctaatgtctttttagcattttgatagtaaaaaataccgctatcagcttcctttgttttaccattttcttttttcaagtccttgccataagctttttggatatcttttaatgaaatattatttttaactacaaattgcaattgacttgcttcgtttccttttgcggaaacacctttaaaagtttgatcatatttctctactttttttatcgtattcgttttagctaatttaataccattgaatttcacgttatcatacttaatcgcgttaataaaattcttatccagaataaaattagcattattaccaatataaccattgtaagtataatatggggttattgctgcctgtgcctgtttacttgttggcgccgaattttcaacaactgttactccaatcagtgtgcccaatgctaatgttgctgctacacaaactttactggttttattcataattatctctcttttccatacaaatattttattcctcacacttttattataactttttcagccataaaaatactaatgattatatttataaatacataacagttttgttatactaattgaagtacacaaaaaacaatgaaaatattaatatcgtctaattttctaatatttattttttaaaatgattatggcaatattgaaataaattatttagcttcacgtatcgactacttttcattaacatggaggcgttatatttgaaaaaacttcttattaccatcgtaattatcgtattaatcggagcacttgggttcgcaatttatgctgcaataaatcattctacatcatcaagtaataaccaagaacaagaaaataaagctacgcataaaaagacagacaccgaagaaaatgatcaacaagatgatagtgcagacaaagcagataaaaatcaaaataatggcaataacgttactaatgacaatcaaccatctttaccgtcaaatgttcctaacaaccattcaacagcaccttcgaatacgcaaccagctcagccaaaagactcaaattcaaataaaaataatactcacggtggtggcagtcaatcgtcaacaaacaaccaaaataatcaacaacagaacacaccacctgctaataaatcaaataataccaatacgccttctaaacaaacacctcaagcacaatcacctaaaaattaatcatttacctgatacgtccacaagtatcaggtacataaatccagaaaaacagcagtatgatatttttctatttgaaatatcttactgctgttctttatttgcataattcgcactctgttaaattcatataaaagttcgctttaatgtcattgacgtatgtataagctctcatgtttaataatattaatacacctttaaaaacgcttacacggaaaatttagaaaggaggtacatgttaaatgcttgatagacacttaaaactactccagttttttattaaaaatccatcaaagcacattagttctaatgaaattgctgaacatgtcaatgtttcaaaccgcacagttcgcaatgatatccatgttatcaatagcaattttatggatgatatcatcgtaagtattaaatctaaaggatatcaattaaatacatcgcagtataccttagaaacgataactgaacgttacacgcatattcaatcatataaagaaaaactattattatctatggcgtatcaactgctaatgcacaataaatcgcagacattgcaacaactagagcaagattatctattatctaaaactgtgctcaacgactatttcgttcgaattcaacaatggtgtcaaaaatttaatatcgctttaacaatcaagaaaaaacaaggtattgtggtcgatggaacagataatgatatcactaatgccatcatccatttaaatcaattatcatcagggcatgtacatgttgaagacctaattttaaatgaattacctgattcacaccaaaggatgatttcgcatattatacaagagacacttcaacaacatagtattgaaacaactgatattcaaatacaacagcttttaattcatctcattttaatcattaaacgtaagcaatctttaagtgagctagacacgttaaaccacgatgcaaaattgatatctcaatcttgcattaagcaaatcaacaaaagattaggttatgacttgaacgaaaaagtaatcaatatgttttcattctttattggttatcattttaataaactcgatattggcatagaacgtatatttatacaaagctatattgatcgcttaatcgaattgatgcaacaacatattcatgtacctttcaatgaagattcgattttacaacaaaatttatataatcattttagtaaagcatatttacgtatcactcaaaacatttatttaaacaatcctttagttatagagattaaaaaactctatccctttgtgtttaacacactttttgaagcgattgataaattagcaattgatactgatatagagatgagcgaagatgaaattgcctttttaacaattcattttcaagctgccatcgagcgtcgtaccaaaacacaattaaatgtagtcatcgcttgttattatggtctaggtgtgtcgaattttttagaaactaaaataaataacttatccgaagagttgtcagtgataaatacgattaaactagaaaatataacacactatcactttgacaatgtagatttattaataacgacccatgatattccaaaacaaacgctaaacatacttcctaagcacctaacgattatcaaggttgcaccattattttctgaagatgaccgtcacaaaatcagacacgttgtgaagcaaaagcaaaatccggttcaagcacatcatcatatggacactgtcaatttccttgtcgtaaatactgaacaaaaaccacgacatactgtgcaaatttttgaagaagctcaaaaaatattacaagcacatcatgcgattgtagaaggatatatcgaatcagctttagagcgtgagaaatcatcttctacatacataggtaattttatggcgattcctcatggagatcctgaaaaagttttacaatcacatgtgcttatttttcgtacaaaagatgtttttccttggcgacaacacgatgtcaaacttgtctttttcttagcgatttcgcataaagacaaagcttttacaaaacaaatgatgcaattaattgctaacttggatgatgattcagtgaaccatttatgtagtttagatgatcatagtttaaagcaacagttatttgaatacttacaagaataattgccactagtaacggtaattattcttttttttagtatcgagaatgcgcttacaatatagaaaaggagatgattttatgaaaattgtagctattacctcatgcccaaatggcattgcacatacatatatggctcaagaaaaacttgagcaggtagcaagagaaatgggtgtggatattaaagtagagacacagggcggtgttggtgctgaaaatgttttaactacgcaagacatcgaagaagctgacggtgtcataattgcagctgataaacaagttgatctgtcccgatttgttggtaaacggttgattaatgaaaatgttcgcgaagggattcataatccgagaggtctaattcaacgtatcattaatcaagatgcgcctatttatcaatctgaaacaaattatcattcgaaagatcgcgataagtctaaaagtggtattcaaatggtgtatcaacatttaatgaacggtgtatcgtttatggttccttttatcgtagttggtggactccttatcgccatcgcgctgactctaggcggtgaaacgacatcaaaaggattagtcatcccagatgattcattttggaaatccattgaaaacattggtagtttagcctttaaatttatggtcccaatactagctggatatatcgctgttagtatcgctgacaagcccggtctcgttcctggtatgattggcggcgctatcgctgctgacggtagtttttatggcagtgatgcaggcgcaggatttttaggtggtattgttgctggtttcttagcaggttatatcgcaaagtggattaaagatattaaagttccaaaagcaatggcaccaattatgcctatcattattattcccattatttcatcggtcgttgtaggattgatatttatatttttaatcggtgcaccaatttctaatatttttgaggcattaacaacctggttaaaaagtatgcaaggtgctaatattattatacttgcgatgattataggtgcgatgatcgccttcgatatgggcggtccagtaaacaaagtagcatttttatttggctcagcacttattgctgaaggtaattacgccgttatgggtatggtcgcagttgctgtatgtacaccaccaatcggtttaggtttagcaacgtttgttcaaaagtataaattcaatcattccgaaagagaaatgggtaaggcttccttcactatgggactatttggtattactgaaggtgctattcctttcgcagcgcaagatccattgcgcattatacctgcaaacatcattggtgcaatgattgcatcagtcattgcagccattggtggtgtcggcgatagagtcgcacatggaggtccaattgtggctgtattaggtggtattgatcatatattatggtttacctttgcagtgatagtaggtagtcttgtcacaatgattactgtactattattaaaacgcaatacaccagttatagcagtagatgcaccagcgcaacacacgcaacttcatgatacagatataacacaacatgatacagaggttgacaatgtagataacaccgcgaaacattcacatctcaataaaccttctcatgtttttgatcaacaaactatggtaattactgatcacgacatgtctcgaaacgaagcaattgatatgttgattcataaacttaaaatttgccgttatgtagagcacacatcgcatttaaaaaatgcaatcctagaacgtgaaatggagtctacgacagctattggcatgaacgtggccattccacatgcaaagtctgatgttgtaaaacaaccgattgtagctgttatgaaaaataatcatggagttaaatgggagagcctagatggtagtctacctcaattgatattcttaattgccgtaccaaacaacagtcaggatacacatttaaaaatacttcagcgcttatctaaagcgttaatgaatgatgagacacgccaatcactaattaatgcaaacagtactacagaaatttacaacttattaatgaaaatatagaggagttttaaatatggcattatttttacaacccgtttttaaagacagaatttggggcggtcatgcattaaaagcatttaactatgatatccctaataaaacaactggtgaatgctgggcaatttctgcacatccaaatggtcctaatacaattatcaatggtccatacaaggatatgaccctagatcaactttggtcacaacatcgtgaattattcgataatgattcacgagatagtttccctctgctaactaaagtattagatgccaatgataaattatctgttcaagttcatccggatgatgattacgctttaaaacacgaaggcgaactaggtaaaacagaatgttggtatattttagatgcagccccaggtgctgaaattatatatggcgtacatgcacataataaacagacgttaatcgacatgattgataatcatgaatttgacagtcttttcaaacgtatacctgttaagcccggtgatttttattatgttcctgctggcactgtccatgccattggttcgggtattttaattttagagacacaacaatcatccgatacgacataccgtatttatgactatgatagacgagaccaaaatggtcaattgcgtgatttgcacttagagcaaagtaaagatgtgattgaattaggcaatcatgaaccaaatactactcctataacaactcacatcgacacacacactgtaactcaatttgtagataatcaatattttgcagtatataaatgggatattcatggagatttaaaattcaataaaccacatgcttattgcttagttacaattatcgatggtactggcactttagcagtaaacgataagcactatgacatccaaaaaggttctagctttattttaactacggaagacgaggatattcactttgtcggtaatattagtgctatagtaagtcatccaggataatagcaatgataacacccgtcccataaaagacagaaattactatctcttctgtctaaaaacataaaaatccacacattaaggtgatagaaccctagtgtgtggatttcatttttattctgtaacgttactttggtcaactttttcagatacgcgcttcatcaatggatctgttacaggttttaaaattaaacctacaacgaagaatcctatgccaaataacgttaatataattaattttgtaattaagatttccggaacaataccgcctactgtttcacgtaatgaatcaatggcatacgtaaatggtaagtatggtgaaatgttttggaaaaattgtggtgtcgtttgaattgggaatgtacccccaccacctgcaatttgtaatacaagcaatacgattgcaatggctttacctgggttaccaagtaatgatacgcacgtgtatacgattgagttgaaaataatcgaacagaaaatcgttataagtacgaataatacaggtgactcaacccctgcttttaggattaacaaatctccaaccgatacaatgagtgcttgcaacataccaagcattataaagaatcctgccttacctaagaacacttgtcttgtcgttaagactgactctagactcttatgtttattatcaaccgttaataaacttaccatcaagagtgcacctacccatactgacagtgcagtatagaatggtgtcatacctgaaccataatccttaactgggaaaacatcaacagtcttcttattaataggatttgcaataatacccgcttgcttcttcaaatcattcttaagcgtgtcgattaatttgtcgactgcatcatctttgtctaatttcttgaaaattttattcgcttttttcaaatctttttcaacatcaggcaacttattttgagaaaaatcagctaaatctgataaagcctttttcgcttgtggctgatttttatttagtaatcctaccgcttgatcataaccatttaataacgttggtaaatttttattcacacttgctgtcgcattggttaaacgttgctccaactgtggtaaatcgttacgtacaaagttagctgctttcgctacatcacttttcactttagggaagtttgcttgagcatttttaacagcactaatgtattgttgttcaatacttggtaatactgtttgtaaacgatcgatacgtgttttaccattttttaaaatagattgaccactgttgatgacttgatcaattgtatttagcttagactgaacattagacaatgccgtttgccctttattcaattcatccataatacgttgtgatattgatactaaagagctgttaagatcttttttaacataatctctaaatgatgataatgatgaatctagttttgacagttgatctagtaatttagtagcttcagcagttcctgaactaccattctttaatgcattgcttaattgattaactaaccttaatgattcattaattcgattattagctgcctttaccttatcaatttcttttgataaatcaacattttcattcttctcaatctcttttaatgtatcgataaattgttgattatattgagttgtgtattctaaaccggacttaacattatctaaagactctctaaaatcagaaggcttgtccgatgctaaaatgccatacgaaatattacgtaatgcctgactatctttttgtgcggctttcgcttgggtatctaaattatttgataatgataataaagagcccgttaatgccgcttccattgatttaacatctttatctgtaatgttttgtgtgttctcgttagctgtgctgacttgtgttgttgttatatctgcaaaactttgcccatcttttttcccgcttgtactttgtggtgtagtcgatacaggcgcattattactatttggtgcggtattttgcgtaacattattatttggtgcaatatcgccacttggtgcacttggtggcgttgatgctacaccattaccagctgcaggtgcactatttgatgtttcgttgttcgccgcgctattttgaggaatctgttgctgatttcttcgatttaaatcttgcgcgcgtcgaattgcatcttgataatcaccgactctacttctaacttgtgtgacgaagcctttggcatcatttaactgtccattagcttgatcaataccttgactcgcaatgttaagtccttgattaattttagggaactgcgctggcacgtcatcagctgcaaaatttaacgctttttcaattttcggcatataattatttaaagctaatatcaacttagccttttcattaagttgcggaatagcaccattgacttcgtttaattttttctgagcatctaaaatatcacctttataatttcctagttttctaaaatcattcgcatatttatctaaatccgcttggtggttattcaaatatacaattttattcgcaaagtcattaatcttaggtaaagctttatctgctgaatataccgcattttttatcttgttaattgtcggcacattttcttcaatagttaaacctgctttgttagcttcttctaataatgctcgagttactgttttattaaattgttcattcgctttttcaacgacaactgacgaaccagtatctgttagcttagacgcaacagcgttaatcttctgattcaccttaaattctacatctgctttttgaggctgcttacgtagtgtcccggtaatttcatgtgtaaacttagatgggatgtaaatacctgcaaaatatttacccatttttatctcatgatcagctttctctctacttacaaactgccaatcaaagcttttatttttcttgagtgtattaaccatcgtattaccgacattaacttttttccctctgattgtgtcgcctttatcttcattaacgactgcgaccttgatgtgtcccgtgttgccatatggatcccacattgcccataagttaaaccaagcgtagaacgatggtaaaatagctaagcctgctaagataatccacacagctggcgtcttagctactttcttcagatccattttaaataatttaaatgcgttcttcattgtcacactcctatgtaggaattattcatattttttatatattttttgtaaattaatttatttttgcgttgtgaattagtataatcaatttactggaagatatttagtcgattgatacctatcaactattttcagcatacgataaattataacaaatcatagtttattatcacacttaattattatatttttcaagggagaatacgaaatatgcctaaaaataaaattttaatttatttgctatcaactacgctcgtattacctactttagtttcacctaccgcttatgctgatacacctcaaaaagatactacagctaagacaacatctcatgattcaaaaaaatctaatgacgatgaaacttctaaggatactacaagtaaagatattgataaagcagacaacaataatacaagtaaccaagacaataacgacaaaaaatttaaaactatagacgacagcacttcagactctaacaatatcattgattttatttataagaatttaccacaaaccaatataaaccaattgctaaccaaaaataaatacgatgataattactcattaacaactttaatccaaaacttattcaatttaaattcggatatttctgattacgaacaacctcgtaatggtgaaaagtcaacaaatgattcgaataaaaacagtgacaatagcatcaaaaatgacactgatacgcaatcatctaaacaagataaagcagacaatcaaaaagcacctaaatcaaacaatacaaaaccaagtacatctaataagcaaccaaattcgccaaagccaacacaacctaatcaatcaaatagtcaaccagcaagtgacgataaagtaaatcaaaaatcttcatcgaaagataatcaatcaatgtcagattcggctttagactctattttggatcaatacagtgaagatgcaaagaaaacacaaaaagattacgcatctcaatctaaaaaagacaaaaatgaaaaatctaatacaaagaatccacagttaccaacacaagatgaattgaaacataaatctaaacctgctcaatcattcaataacgatgttaatcaaaaggatacacgtgcaacatcattattcgaaacagatcctagtatatctaacaatgatgatagtggacaatttaacgttgttgactcaaaagatacacgtcaatttgtaaaatcaattgctaaagatgcacatcgcattggtcaagataacgatatttatgcgtctgtcatgattgcccaagcaatcttagaatctgactcaggtcgtagtgctttagctaagtcaccaaaccataatttattcggtatcaaaggtgcttttgaagggaattctgttccttttaacacattagaagctgatggtaatcaattgtatagtattaatgctggattccgaaaatatccaagcacgaaagaatcactaaaagattactctgaccttattaaaaatggtattgatggcaatcgaacaatttataaaccaacatggaaatcggaagccgattcttataaagatgcaacatcacacttatctaaaacatatgctacagatccaaactatgctaagaaattaaacagtattattaaacactatcaattaactcagtttgacgatgaacgcatgccagatttagataaatatgaacgttctatcaaggattatgatgattcatcagatgaattcaaacctttccgcgaggtatctgatagtatgccatatccacatggccaatgtacttggtacgtatataaccgtatgaaacaatttggtacatctatctcaggtgatttaggtgatgcacataattggaataatcgagctcaataccgtgattatcaagtaagtcatacaccaaaacgtcatgctgctgttgtatttgaggctggacaatttggtgcagatcaacattacggtcatgtagcatttgtagaaaaagttaacagtgatggttctatcgttatttcagaatccaatgttaaaggattaggtatcatttctcatagaactatcaacgcatctgccgctgaagaattatcatatattacaggtaaataagtattatattaaacccgtaaaatttataagtataaacaaggagttcggacttaaacatattgaaatgctcccttcaaagtagacattgaaaaaatgaaaactttgaagggagctttatttatgtcaataaaacctaaagtagacatagatgtactgctatatatgtttcaagaatatgaaaaaggcgtgtcgtttcaatacttaatcgatacattacaattagatattaatgtcaatactttgtatcctaagtataaatattataaaacccatggtattgaaacactacttacacaaaaacaatacaatcactattcaaaggaactaaaattaaaagttgtaaatgaatatttgaattcaaatcaatcaacccaagatctcgcaatcaaatacaatattcgtagttcgacacaagtcaaaaattggataaaaatgtatactgtaggaaaagagattaagagtcaatctccgaaaactggggtgtatatcatgaaagcaagaaaaaccacatttgaagaacgtgtcacaattgttgaatattacttgaatcataaacaatcttatagagaagttgcagaacactttaatatctcatacggtcaaatttaccagtgggttcaaaagtatcaagcacatggtaaaaatggattagtagatggcagaggcaaaggaaaaccgaaatctattatgacgccagaagaacaaaaggaagctgaaattcaagcattaaaagcacaaaatcgattattagagatggaaaatgacgttttaaaaaagtttcaagcattggaaagagagatgattcaaagagaaaacaaatcacggcatacaaaacgattgaagcgttaaaacatcaataccctatccaacgcttgtgtcgtattttaggcatttctagagcgagttattataagtgggtacattatcaatcgagtgaacttgaattagagaatgaacaacttaagcgagaaatagaatcaatctatcataagtataacggtatttatggctatcgtcgcatttatatctatattcgattaaaactaggtaaacaagtaaaccgaaagcgaatttatcgtttgatgaaagaacttaatttaaaagcggtaatacgtcaaaagcgaaaaccttatcgccgttcaacgccacaaatcacatcagaaaataagcttaatcgacaatttgacattgatacgccaaataaagtttggttaacagatgtaacagaatttaaaatcaaagaaggtagtaagatatatttgagtgccatttatgacttaggtgttaaacgtattgttagttatgagctaggcccttctaacaataatcaattagtatttaaaacattcaatcaagcgatagaaaaagtagaaaataccaaaggtattttatttcatagtgaccgaggttttcaatatacatcgaaaacatttaaacatatgttggatgaatgtgacatgattcaaagtatgtcacgtgttagcaaatgtatcgataacggtccaatggaaggtgtatggggtacaataaaaagtgaaatttttagaggaaataagcactttaaatttaatagtgtagaagaagctacaaaaacaattcatgattttattcttttctttaatcatgaaagaattacattaaaaatggctgattctgtataacaacaaaaccaaccattaattttaattatttaattgtctactagactgggtgcagttcatatttctgttcataagtccgatttcttattcaattaaacccgaggcattcagttcgaacgcctcgggtcattttatataaatatattattttatgttcaaatgttcctcatcatatcggtttcaattgccatctcacacattttataaatatgagcaaatgtacttattctcaaacattactgccgagctttaattgacgttatattaactataaactacttttccatgactctacagattcaatgtcacatgagcgtgataaaatttgttcaataataaagtcatgtttatcatctgatctatcaccaacagcatcttctaaaacagtaatataatagtctttatctacactttctaatgccgtgctcaatacagctccacttgtagagacacccgttaatactaaatgattaatatcatttgcacgtaaataaacttccaagtaactacctgtaaatgcgctaaagcgtcgcttagaaataatcggctcatcttctagtggtgctaagtcttcaagtattcgtgtagatgcatctgcttcagtaatcgcatatccttgagctttaattgttgaaaacactttattactcgaggagacatcattaaaatgcttatctaacactaaacgtatgaaaatgactggtattcgatgttgtcttgctgcttcaattgctctctgattcgctttaataatattttttattctaggtacactactcgctataccttcttgcatatccaaaactaatagcgccgtttttcgagacatcttcattctcctttacttgtgtagttctaagtcgttaaattcattataacgttaaaatgatggacaatctattcattgcattttgcatatacttcacaataatttaagggggaaataagacgtcttatatacttaaaaaaaatatatagatgctcttccccccaatataattatgctttatttttcaaattattgcgtcgtgataaccaaatcattagtacacccattgcaccaacaattacagatatcggcaaccaatgttcttttatcgtttccccccgctttaggcaaagatacattaccatcagcatttaataatccacttaacaatccattacctttaccaagtgttaacgtcttttctggctttggtgtgggtatatctggaatactgtctaataaatttgatccttgattcattaaatttgctagcttatttaaatctgtcgttttcccatttttattcaatctatctagtaaacttggacgatttactattggtgataaaacatagtctatatctttttttgtttgattgagtctcttttgtaaattcaataaatcatccgctttaccattcaatgccgatttaactaaattaaaaattttattttgatctgtttctattttagtaattaaatctgccagtaattttgccttttgtctttctatacgtgttgctaaaatcgtttcaattgcttgttttttatctttggcattattcaaaattgcttttaatatatcatctgaagacgtgtcgccagttgatgcaaaatgtttcttcaattggtcaacgatttggcgatttgataatcctttattcgtccaatctttagccaatttatctgcttcagcttttcctaatttcgtttgtaaaatttgagaaatcaatagcgacttatcttgtgattgatcaatcaatgacgttaataaatcatcactcgttgtcagagatagttgatcaatatgacgagtaatttgatctgcaatttgttgatctgttttgccatcaacacgtatatcttttagaattttatctgcctcgtctttattaaatatactttctaaaatgctttgtgtagcatgctttttatcatcagtacgtgcaagttcttccaaaataatatttcgttgactttttatacgctctttcgtcttatttacttcgctcattaagtctgatttttgatttttaggaagttgcgtatttgcaatacgttgatctaaagattgtaacgtattcagtttatgatatgtgtaatgttgcgttgaggcattacttttagccattttttcaatcatagcatgattaattttatcgcttccttgtaatttatcagtgagtcgattactatggctttgattctcttcatttgaaagaaatttatttaacacaacatgtccaaaaccatcattatttggcgttttagctacttcatgattattatctgttgtagacactgctggatcttccgatgtatcttccgatgtatctttcgatttgtgtatttgctgattcaattggtctaagtcttctaacgccttatttaccattgcttcatcatttttatcatctttttctccatgttttgttgtagccgtttgtgacacatcatttttcattgcattaagatcgccctcgccactttgttgacccctatcaacctttgaagaaacctcatttaaatctttaagcaattgatctaatttactgtctatatcactttgaccgttcatttcaatttgaaatcctttattgtctttgctatccaactcattagctcgtttaatgatttcatctatttgcgatgctgttttcgcttcatttagttgtgctttataatgtgctttagatgaagccgataactgttttaattgctcaatttgacgatttgctttgtcaactttgtctaataaatcttgcttagataatatctctgttgaaatttcagtatccttttcagatgcagcttgggcatcgtacggcaagatattcgttaaaatgatactagtcgccaacattgtcgaacacgataactttacatataattgaaacggtttccctcgatatttagccatcaacatactcctttctcacttacttccttaaaagaattacatactattatatacctgtttacaagaaatttacacttatctatctagttattgttgttagtaattatccacttattacttagcttatatttaaataaacaaaaaaagcatgacgtaatatcatattgtccatgtcgctaacatcatattacgtcaaatcttttatattaaatgatgctttattttagactgctttttctttttagctttcgagcgcctgtttaaaaacttgctcgaattgttcacgcgagatttcgtgtgcatgtgctttttgtgctaataaagcatctcgaaactgttgttgatctttcaaactttctaacatttgtattaattggtctttactttccattgttatctcatcattatgctcaaataagtgctctgatagtgttactttagcatggtgtgctgtttgacgataacctaaaatcaacaactcatagtcaaacgcttgttccaccgcatttaaaatttcattaccctcattgatatcaagataaatatcacataactggtatagttcatttaccctgtctatattaatagatgggtataagtgcacattagcatattgatcaagttgcattagcttatcagacatctctgtaatagcagcgatgtgaaacttaaaatctggtaaagtttcaaccaataccttgatgttacgaagttgatccgagttagttaatattaaaatttctttagtatatctattacgactacgataattatatagatatccgccttgtaaaatacgagattgaacctttgcgtctgctatattgagcatcgtttcatattcgtttttatctggaataataatattacaatgtcgcttcatatcacctttacacatcaattgcatatttcccgggacattaccatcgcactgttcttgccataccaaaacatcactaccatttgatggcaaattatataacactgaaaatggtagggctagtgagttaataacgaaatgatgttccgtaatttcaagttgcttgataaaaaataatacgaatgcgagctttgaagggaaaaagtaagacttcccttgccaatccaatatgacatcagatgttacaaaattttcataaatcacttctttaccttctgctgtcatatatttcttcaagatcgctttacgatttaaatcgtaaacagtttgtgcaaatttaataccattcttagaataataatcgacaaatcggacacgttgttggtcatcaaaccattcgacacgactaacaattctagggcgctctccactttgataaaatattttgcctcgtagacgtcccatatcattaattgtagccgaattgttgttacctttaatttcccaaaaagctggtacagtaacctgattaaaaaatcgtggtttcatattttctgaattatgattatctgcaaaaaattgatacggtgatataacatcgtccggtaaaaagccattgtcattgagtacaattgttaaatcttcctccaacttactggctttaaaagactcatataactttcgtgaatgatcgttaaaataatcaaataatttaatcatgcagcacctcttgaactaatgtttcccattttaaaataatatcttgagtcataaattgctgtgccacttcataagagatgtcatgtggtgtctggggaccattgttaaaatacattacaatggcatgagctagttttgcgacaacatcatccacactatcttcatcggtatcaaaaggtaccaagtagccattttccccatctcgaataaaggttgggttaccataattcacatttaatccaatcatacctagtcctgagcctaccgcttccattagtgttaacccaaaaccttcactagttgatgcagaaagaaacaactcataatcagaataaatttcatcaagtttaacatgccctagtaaacgaatataatcttgcgcgcggtgtgtatcaataattttacgcagtcgcgtcttctcgctaccttctccataaatatcaaatgttaattctggcacttgtcgtttagccacgataactgctttaacaagccaatcaatatgtttctcatttgctaaacgagatgcactaatcatcgcatatgactttcttgataacgttggatatgataatgcatcaatgcttcccacaggaatagtataaacacgtggacgataaccttgatattgctcaaattgtcgacaaaccatatgattttgaatatctgttgctgtaataaagaaatcaatgtatttagcttttgaaaattgatattcataataattgttccatagtatatgctgctcactcatcatattattactataatgatcagcatgaatcacaacaccaactttactatcacctttatgctgcaaaacagcctgaccaatatcagaagcgcggtctaatatgacaatatcgtctcgggttaaattcaatcgttgtaaaaagtatgcaataaattccgttttgttatacaacaccgcatcttcaaacacatatatagagctgtctccatcaatatattcgttataagcgatggagccattttcattatagaattgtcgcatatataatttcgctttattatcagctggtgcataatactcagaaaatatgcgtgtataactataaaaatctttacgtactaacatactattaattacaaattctgcacgatccacaatgtctttttgttcattttgcagataacatgttacaaatgatgatttcccattaaaatataggcggactatcttaccatttctttctctaaaactaatatcatgaccaagctcacgttcaatgtcatctaacgtgtacgttgttggcgctatagaaatatcactaaaatactgatacaaccaaataacttcttgatcttcaaacccaatgttttgcgttaatgtctgtatgttctctgactgtataaaatctaaaaacacaaatttagtgtcttgatttgtacgtctcaataatttagcacggtaagcttgtgcatattcaacaccgctactcgcccagcctataccaaagtttatattatatattgtcatgcgctaccccttttcatttatggaaaatgtataactggcataccctctttatcaaatgtaatcatgctttgacaaatatttttcaccattctttttttgatatttcgtgtcataacttcaaatgaatctaatgcaactctatggtattcaaaaatagcgttacgttgcccattttgtcgttgattaacgcttgcttttaattgttgtaaatagtcgacttgttctaaccaacatgaatcaattgctttcaaaaagactttttgaacgaaaatattataataatatgcactttgcatgtttttacgattcaaagctacttgcttttcaaattgctctaataaaaatgtcactactgcttgcttatctttaaaattaacacaagccacatctttattaaattggaaacttaaattttgataaatatactcgacaacacgcgattttgttagcaccttttcctcatttacaaacatttcaaatacatctttagctaacgctttaaaatctcgattctcagcatcatctatttctaaaactcgattgcgttcctcgtatacaagatctcgctgtatactaatgcttttttcaaattcattagccatttcacgagctttaaccccttgttcttccgagatacgctgcgctttaactacaatttgcttaactttgcgattaaacaaactactttgcgataatcgttgtgcatctaatgaatataattgattattttccgctaaattactatcgctccatcgcttaactaaataatcatctagtgaaatatatatacaagatgatcctggatccccttgtctaccagaacgaccacgtaattgcctgtctacacggctattttccatatgctcatgaataataacagctaatccacctaatgcttcgacaccttcaccaagtttaatatctgtgcctcgacctgccatactagtcgcaacagtcatggaaccaatttgccctgcttcagctatcatctgcgcttcttttgcaacattttgcgcaatgagtaaattattaggaatatccatttggaataatactttcgaaaagtattcagccgcttcagcagttctcgttatgagtaaaaccggtcgccccgtttcatgaagttcaactatatcatgaatcatcgcgatgtttttctcatcaactgaacgaaacactttatctggttcatcgatacgttgaatcgctttatcagttggtacttgtacgactatttttgaatacaaatcaaagaactctgattcgcctaattttcctgtagctgtcatacctgaaaatgatccaaaaagtttaaataaattctggaaggtaattgttgccataacacttttatctgttgaaacctccataccttctttcgcttcaatagcttggtgaagtccagcttgcaacttagttcccggtaacatacgacctgtaatacggtcaattaaaacaatatcaccattatatacgaaataatcgacattatattcaaacaaatattgcgcgcgcagtgctagattaatattacgcactaggaccatcgctttttcgctatataaatcttcaacattaaagtatgattgtgccgcttcaataccttgatttaacagccatatttcttttttggtcttcttcattttaaaatgcacgtcttcaatcaatgtatctacaaactctttcacaatatgaaatagatttgattgtaatcttggtgcacccgaaataactaatggtgtttgcgcagcatctaaaatgattgaatccacttcatcaataataccgtaatttaattgtggtaaaaattttccttccgcactatctgccaaattatcaattaaataatcaaaaccgagacgtccattagttgtatatataatatcatgttcatatatattacgtttttcccctttttgatactcataatccacaatatcaacaaaacctaatgaagcagttaaacctaaccattcatataatggttgcatctcttcaaaatcacgcttcgctaaataatcattcgttgtaattaaatatgttccttttcccgaaagtgcatttaaatataaaggcatcgttgctgttaatgttttaccttcgcctgtttgcatctccgcaatgttaccttcatgcaatacaatcgctccgattaactgaacttctttaggatacatacctaatactctccagctcgcttcacgtgccactgcataagcttcaggtaacaatgtgtctagtgtatcaactcctgatactaaacgttctttaaattctattgtcttttgttttaacgcatcatcagaatatgatttaacttcatcgctccatgtattgatgcgtttcactatttttctaatcgactttagtcttaattcgtttatcgtaacatctagtttatgtttcatttacttccccaccattcagtttcgatacatctaagtaatctaaaaatcgtactggattcattaaacgtgacatataatttagatggttgtcttgctcttctttaaaataaacctcgacatttgtatcttttagttcatgatttcctgggacatgttctttaaaccaatcttttaaatcatcatcttcatggcttgtacgatacactttgcaatctaaatgctgagcgacataagttgcaaaaacatttgactttgacccataactaatcaaattaatagcctttagggtatcttgactttgcaaatcattctttagttgcttaatattttcctcgatattgtcgtccatccaacgttcaacgagccaaacatgaccaaacggtttcaaaaaatcattcgaaatagttggataggcgtcagatggttctgcaataatgacattgatcctatcatttccatattggtcatcacctatcttcgtcacccgcatgcttttatactctaaatcatcttgatgcgtcatctctgtaattgttaaacatctaaatataagactcgtcgatgctgcattcatcatttttattttataagcataggcttcatcaggatattgaatcgtaatactatttgactttacaatctcagtacttagttttgtgccatttttattataaaaaatgatgataaaatacactgaaccagcaggcgttgcatcaaaatcaaaatgcaatttataatgctgtcctctacgcaaaattggtaaacttggcgcacttttatattttgaaaattgttttaacatcaaccactcatgaatcggtaatccagagggcatcaaaggatttataaaagtcacttcaccatttgaaaatgatacttttgagccatacataaatgtagtttgtgaaatataattccaagtaactttaaatgttttgtttttcagcatgttgaactctcccaaacttgtcttccaaaataatgttgtaaaaattaacaaaccaacttgcaatggtaggtgaatcatcattatgtcgcccaggaatactgcgattcatcactcttgcttggtgtgctgtcaatacaggtagtagctcttgaaatgcatgtggatcataatcatcatgttgcatatatgctatggcaaaaacagtttgtgacaatgatttcttttggaatgtttgccaaaatttttgatttaatgcctgtatcgacgcttgagatgtatcaccttcattagacaccaggacgtctaatgctgtaccgaactcttctggtctaagtaatcgcatatgttcagcaatcgttccaatattaacaagtggtttaccaacaataattgcctgaggatttaactgagcaccataatacaaggcaccaaatgaacccatagataaaccagataatattaattcatgtgatttaaaattcagcttttctaatgtctcgtcaataacattgataataccttgttcatattcagatgaaccgatataaaagctaccaccttcaacacgaggatcgccgataagtaaaaacggtgcattcatacgtttcatcatataatatccttcgaaaccttccgctgttcgataaccactaaaatatacgtttagtggtggtttcatatcaccagggtggaaataataaataaattcctgtcgttgactatctacgaaacgactaccaccaagtaaaaattgacccatgtctaatctagaccatcgtttgtgtataggtcctaaatgtaccgtcccgttgccacgcgccttaacagttacacttatataagcatcaaatggtttcgtaggtatctctaaaggactgtctaacatatcatcagtcaatatgatttgttcaattaatgcaccatcagcgccagtctgaatcaatctaaatgtatattgcaactcgaccgcaccatcaatatcaaattctggccatatttgaatgactttatctttatcgtaaacgagattattttgccaagatgcgataggtttaaattcttttccaaattctccactcaacgtgagctctgaattaccttggtaaacgacatctcctttaaaattcggatgaacaagtgctaacttaggagaaaccttatctccatactgtcctgagaagctaactgcctctaatttattattacgttcttcaatgtttcggtaatgtaatggttgaacaacgtatttttggacattttcgtcttgttcatattcaacagaccaaaatgattcatcaacatacgtattgtatggttcgcttatcatttgtaataaattcgttaatgtctccgagtatggtgcttgaatatagataaaatcaaagcgcccttcagcttcaacaatcgcttcaatagcctctacataaccactatcaaattcaaacaatccaatatcgaagtaatcccaactcacaccttttttgtgttggaaaataggttctaaatcgtctcctccaatttgcaaaactctaaatttacgtggcatcattttcaccttctattaactcatcgagctgattaataatattcttagaagcatatgcatctattaattttaaagaataggcgtacgcataattccaatttttcaaataaaacaaataataatttaacgcatcatctaattcatcaactgtatttataatacggccattgtcataatcagagacgtaatctgtttgttgaccattaatttgtggaatcccagcgctaattgcactaatttgtaaatacaaatcaggttcttttgacatatctatcacaagtcgcaacgtccgcaatgcttctacaacatcatgttcagcatgtatcgtcttaacagcaatgatgtcatcttgatcttcaggtgtcattaatgctgaaacattaacatccgcattctgtttagcttggtattcctcatttaccgacgcaatacattcacgaagccacatcggtatgtcattttgatggcgcgttaataaaattaaacggtaattatcttcttgtgcgatataatccacaagtcgttgcatcatttgttgcaaatcagcgtcactcataccatctatccatacacctataaatgtttccatcaattgactacttatattaggtgattgtctcgtttcaaatggcgtgattcgaatcattgtattctctcgctgatacttctcttgatgactaattaaatcacgttctagttgcacactatcaacaattaaatgggcattctttacgatagattgatattcctcatctgacacagtttcatttctatttttaaaaaatgaataacttaataatttcgccggaatatgattggctatttgtcgattgtgcctagcatctgaagccacaatcacatgatcatcttcatgtatttgttgtgcaatcattgcttgaaatttttcttcaattagttgagccatattgttatattctatttgttgatagtgatgttgatatctttttgaaacagtgactcgtccatttttaaagttttcataaagcacacaatctccattaatcgttaaatattcttggtaagaagcctctccctgattatcaaaataacgtatagctgataaataacctctatcatcaaaaatataacgccgttgtaactgatctctttcaaattcttcaaaccaaattgaatatccttcttgactaaaataaatatttgtataggtctgttcactcgtcacacattttaataaatacggcgtgtacacaaactcaacatcatccggccattttaagtgatgataattaatcgcttgtggcgcatggtgactgaatccttgaatttcatcaaacacagaccaatactttgtttcatacaaatcatatcgatgtaaaaatgttcttatattcggcgcatgattgagaacaatcagttgataatctaaattattttcaaggtgcatccccattaaactaatcatatcgtcaaattccgtcttattttgcgtctgataatacggcacagtcgtgtcttgccaccatcgttggtcatcataccaagctggaataaagtatttcataattacctccttaccaatactggtttaaaaatggcttatatttatcaaaatataaatatgtacgaattgtttctgcaatattaatactgatgtaaactaatacaatcagttgtactgagaaataaatttcagtagataaatgcggtacaaacaatgtgaaataaagcggtataccaataatgattgtaactaatgccgatccaaaccaacatacgcgtcgtgcttgataatttaagtaacgttctgtatccttaccaggtttaactcctgaaaaataattgccactctttaagaaatcttttgatttttgtttagtattgattaaaaatctcgataaaaaataacccaataacatttgaatcactaaatatactgaaataccaattggactatcgaatgtcatcattggcatgtcatctgaaacgtctttattaaacatagataaaataaaatgaataccactttttaagaaaacaaaagctgaaatgctcatcattaatgtaatactgcctgcaggattaaccttccaagacaaataagatttcatatttgtagccgagacattcatcaaatcaatatacggaattctaacttctactaattcaatgaataataggataaacaatgtgattatcacaaggatgattaacaacgcaatcacaatatgacttgcatctatatattccattttttgatgcatcattgatttaataatgctaaccattacaatcggcattggtcctgcgatgccgtaacgactatttttgtcagctaaccaaactaataacatcgttccagtaaccaaaatcaatattgttaagtaaatattgtcttgatgaactcgttctttcgaaacatattcatgaatcacaaaataactttgaataacacttaaaattaatgttaagatgcgctctttataatgcttctcaagacttgtttgtttcatgtatttatccatattccgataagaaatcagcatcaagataatcattgatgttagccacggacctaatcccaaagtaaaaatgtttaaagtattaacgtctccacccatattagaaatagctattttaaaaaacgactcatgttttacttgcatatcgttatacgaaacgatagaaatatttgtacctaatatataaataaacaagataaaacatgtgtaaagtatacgtttatatataattttatattcgtattgttgtaaaagttttaacatgttacacctcttttatatcaaaaacattaaaaagactaaggatatttcactaattattaaaatctgatatagattttttagtgaacaacgccccagtctttttaattttagccagctataaattcaatttatgcttgagaatcatcttgatcattttcatctttctttttctttctcttcattaaacctaaaccaactaataatgtcataacgccacctagtaatccattttgttttattgagtcacctgtatctggcaatctttcttcactttgcgcaggttcagcatcatgttttgatgatacagatgtcgcacttaatgttgactgagattcatttgtatttggtgctatggactcacttgttgaaatagatgtgctcgtgaaatgagtctgactcgtactcatcgaatttgacggatgtattgagttagattctgatgtactcattgacattgagttagacatacttgatgatgttgagtcgcttattgaaactgagtcggacatacttgctgacattgactctgatgcacttattgaaactgagtctgaatcgctcattgaagtcgagttagacatgcttgttgatgttgagtcgctcattgaaactgacgcactttccgaattagacgtacttaatgacgttgatgcgcttgttgacactgattctgagtcactcattgatgttgagtcagacatacttgttgatgttgaattactcattgaaactgagtctgaatcgctcattgaattagaatcactcaaactcattaacccagaagtacttagagaagtgaagtgtcttatcgaattagacatacttccagaattagatgtacttatcgagtctgagtcgctcactgaagtcgagttgtgcgttgaaccagacatacttaatgattcatatgtacttatcgaagttgaaccacttgttgagccagatgtactcaatgattctgagtcactgatagaagttgaatcacttgtagattctgattctacagcactttgtgaaccactgatacttattgaagtcgaatcacttatactgtctgatgttgataatgacgtcgacaccgacgtgctttgtgatgtcgatgtacttgcgcttgctgacattgataatgatatcgatgtgcttaacgaacctgatgcgcttgtgcttgttgactggctttgtgccatagaatcacttagcgactctgatgtactcgctgagctcgagtcacttacacttattgaacttgatattgagtcacttaaacttgtcgatgttgaaactgatacgcttccgctcattgaatcagatgttgaaagtgatgtactcgttgaatttgatccactgatgctagacgaatcgcttgtagacattgagtcactttctgatgcactgatgctcatagagtcaaattgactattacttgttgagcttgactgcgaatcgctcacacttgttgacgttgattctgagccactcatactttgcgagctactcaatgattttgaatcacttaatgaatcagaagtgctaagacttgtggaaccacttaaagatattgatccacttaatgagtcggagtcacttgtactagtagaatcactcattgatattgaatcacttagcgagctagactcgcttacactttctgaaccacttaatgatgccgaagtgctcaatgaacctgatgtacttgttgaagtcgaaccacttgttgattttgaatcacttaatgaatcagattcactcacgctttctgaacttctttgtgacgtcgatacacttaatgatgacgaatcgcttgtgcttactgaatcactcatcgattgtgagccactcaatgaactagactcgcttacactttctgattttcttaatgacgttgagacgcttaatgagccagaatcacttacgcttgttgaaccactcatcgattttgagtcactttcggaattagattcacttacactttctgaatcatttacagattctgacatactttgtgaatcagatatgcttgcgctcattacttcactagccgatgttgatgtgcttgtcgaatcacttaacgatatagacgcactcatcgaacctgatgtactcgtacttgttgagtctgatgttgaatcactcacactatcagataatgacgttgaatcactcacacttgttgatgtacttgttgaaagcgacatactttgtgaatcaagcgtactggtacgcatcgaagtactagttgaagctgatgtactacgagagtcacttgttgatgttgatgtacttgccgatcctgatgcacttgtacttcttgatgtgctttgtgaatcgcttaatgatgttgatgtcgaatcggattcacttgtactttctgatgttgaaccagattctgatgtactctgtgaatcggattcgctttctgaaccacttaatgatgcagatgtgcttgttgaacctgattggcttgtacttttagatatacttgttgaatcgcttagtgacgttgatgtcgatgtggattcacttgtgctgccagactgacttgtatatgatgaggtgcttagtgaatcggattcgctcgtgcttatacttgttgatgctgagacactttgactttctgagtttgagtctacgccgctttgattcattgatgcacttagtgacaatgacgtactcgttgagtcagacaaacttgtactcgttgacgtacttgtacttcctgatgttgattgggacatacttatgctcattgatgttgaatcggatttactttcacttgatgatgttgagtcggattcactttcacttgtagaaccacttaatgatgtggatgtactaatggaatcagatttacttgtactgattgaatcacttgtcaacattgatgtacttaatgaatcagacttgctaccacttgtggaatcacttaatgatgttgacaaacttgtagagtcagacaaacttgtactcgttgacgtactcagtgatgttgaaacactctcgctcttaaacgttgacgttgattcactgttacttgtcgatgttgaaatggacgaactaccacttgttgaattacttaatgatgttgaagtgctaccagattctgatgtactgtctgataatgacgtactcgcacttgtcgaactactcactgactctgatgttgattcagacgtacttacacttaatgattcacttaaaaaggcagatgcactttgtgattctgaatcgctaatactatttgattcacttaatgatatagacgtgctctctgaagcagatattgcttcacttatagagtcgctcgttgacgttgattcacttattgaatcagactctgatgtacttaaacttgtggaatcactcatagatgttgatgtgcgttctgaattacttgtacttaacgatgtcgaagtacttaccgaaccagatgtacttgttgatacactttgagatattgattcacttgatgcagttgaagctgatttgctatcactcgttgaatcactaaacgacgttgatatgcttgttgaatcggattgacttgtgctcattgaaccagatgtactttgtgattccgacatacgtactgaactacttgttgatgttgatgtgcttgttgagccagactgacttgtactcaatgataatgacttactgtcagaatccgatgtacttatcgaatcacttaatgattctgatgtactacctgactgagacgtgctcatcgaactacttacggacattgatttactgtctgatgcagctaatgatccacttgtactcatagaatcgcttatcatttcagacgtgctcattgagtctgatgtgcttgttgagacactttgtgaccccgctacacttaatgatccagatactgaatcacttgtgctcgttgaatcgcttaatgattctgatgtactcatcgatttagaatcacttgtacttaatgatattgatgtactttgtgattccgatttgcttgttgatgcactcactgaattcgaaatgctattagaaatacttatagattctgatgtactacctgactcacttaatgattctgatgtactaattgaatttgatgtactatcacttaccgattgtgatgtactagccgaatcggatgtacttgttgataagctttgtgacttagacaagcttcctgatgtactcatgcttactgaatcacttaacgatgttgatgtaagcaatgaatcagatgtacttgttgagacactctctgatttttcagtactgctagagttcgaaatagaatcgcttaatgatgttgatttactaactgaacctgacatgcttgatgatacactttgtgaattcactaaacttgtgcttgttgagcttgatacactattactttcagatgtgcttaatgacttagatgcactcacagaatcagataggcttacacttgtcgatttcgaggtactagctgatgttgaagtcattattgaaccagatgtgctcgtagaagcactttgtgagtcagctttacttgttgacacactttgtgattgttgggtacttcccgatgttgatacggaatcactcatgctatttcttgttacttcatatttaaaagtggttgtcgttttgttaccactcgcatctgtagaaacgattgtaatagtacttgtaccaatgtttgttggtgtaccactaatagtattatttgtgctatcgaatgttaatccagacggcaatcctgtgactgtatttgttactgcattaccactattgtcctgcgtagcaatattaatcggtgatattggagaaaaaacttctgatgatttatctcctattggcgtcactgttggtgctgtcgtatccacaacatttattgtaaaagttgtcgtcgatttgttatttgcttggtcagtagatactactgtcactgttgattgaccaatttttgttggtgtcccaatgattgaattcgttgcactatcataacttaatccgcttggtaatcctgtaactgtatttgtcacagtccctgtaccattatctgttgtagtcaacacaataggattcattgttttacccacttcaatggtttgattgcctacagttacagttggtgcttttacatcagtaaaataatatgtcactgattgtccagcattcgtcatttttacagttttatttgtatcattataagttgatgcatatgaactatcgacagatgtgtagttatatcctttagcagtcaatgcagattgttgattatcgattgtcacgacttgatcaacatttccagaatatgtttttgggggaataatatctttacctgttgttacatcaacgtatctcacttgtgtaacagcagattctgtatattcgaatgttccaaattgtacttgttgtaaatttgtcgcgccacctgttgaggctgtcattgataatgaaaagttggtcgtaccacttttcgcaatccaatctgaaatattacgtgtccatgtttgacctgcatatttaacggtcataacttttgtatcaccattataattaatatcaaaatcttggaacgtgttgtttgtaggttgaacatttaactttgcagcattatcagctgttgaacttgatgtatatgttgatgcaacaccataactatctgttgttacaaaggcaccaaacgcacctccaccagctacattagatgggtcagctttcgcctttgctgatgaatttggcgtagatgtattgtgatacgtatctaatttgaagccaaatgcgttacttaagccaccaatacctactgcggcaccgtttaaccctgtttcacctaatacacctggtgaaaaggcaaaaccgataccatctccaccatttccatgcccttcatatttgttacctaaatttacttttccagaaaaatgaaaactcttattagagtcaatacgtgttcctaatgtaatggcacctttttggcttgttgtatcttgcgttaacgttacgacccctgtactttggtcataagtggcattacctgaagttgtcatatattgttttaagttatctttattaactgtaattgtattagcagttaatgcggttgtcgtcgctgctgacgcaaatgttgacatagctaagcgactgaaagttcgaagttttactggtgcagtgctagttgacgttgtgctagttttgtttaagttggctgaagttggcgttgtgctttgtgaagtgttatttgatgcagtactttgatttgttgatgtattaattggttgttctgtacttgaagttgaagttacagatttagtatcagaacttgatgtagtattctttgaggatgttgattctgatgtagatgtcaatttttcttgttgattgcttgtactattagttgtcgaagtgacattttcagacttttcacttgagactgtgtcactatttgatgtttgtaccgaactactatttttcgttacgcttgtggaatcggctgttgatgttgatgcatcgattgtcgttgagttttgattacctactgtttcactttgtgtatttaattcagatgttaatggtgcatcagaagccgcaaaagcttgctggtcatgcaacatgtttaccgtgaaagccccgccgatcactgccgtcgttttcagtccgtatccagtcatttttttactaatgctttgattatcttgactcaccatactatgactaataaatggtagtcccattattttgaacatttctatttctttaattccggatttcacccaattttttccagatttataaagtcttactcttgttttttcatttgctaagctgtcatgaaattctttctgtcttttactcatgtaataactccttgtattatctttacattcattagattataatatatgccactattcaatttaatacaactcttttttaaataaaaaatacttaatttgtcaaaatccaatttttctcaaaagtatattctttgatgaaatcgctttctttattgtgtgagatttagtataattttttaactatgttctgaataacatgccttattatgtttatataattttgaaatcagtgcttatcatcttggacatcttttatttatttggtaaaaacttctttttattaaaatgtatttatcatccaccttttattcattaatagtcaatttacaactaaaagataaatattatatttataatacatctttaatattaaagtaatatcaatatattttcaataaacctagtgttatatatctgaatttctaaaaaattcttctttaaaattataaatatagcgacatatcgcttcccggttttgaaatataaaaatacatcgaaactaatttcaacgtgtagttccgatgtattgaaaatgattgaattcattatttcttgttatctgattgattatcaaaatttcttccttctaaacctgcaagctcttctttagaagctgatggtgctttcatttcaaatatttcattcacaaccgtgtaatcataatatcctaacctagcaataggtttaatcgacttaatgtctaatttaccattatcaagaatgaccttatcgtcaatatgaacctgagcaactcttcctataacaatatcaactgttgatacagggtctcctgtcggaatacgaatcgtttgaacgtactcacattcaaaatgtactggcgattctttgactcgataacctggtgcttctatacatgcttctttcgtcacacctgcatattcaaattcatcctcttcaggtggtagtgccttcgacgatgaattaacagcttctcttaaatcatacgtggccatgttccatacaaaccaccctgtctcttctgcattttttactgtatctttacgctcatgatcaccaagaacagattgatttgctgcgaacataaccataggcggatcccaagttaagttttgatactgactataaggtgctaaattatctttcccatctttcgatatagtagagatccaccctattggacgtggtactgtactacttttaaatggatcgtgtggtaagccatgactccttacaccttgcttcggcgaataattcattctatcctcaccccttattagtaattacatttaaggttacgctctcatgacataagcgtctaatataaataatcaatttatttataagtagaaactatatatgacatggttgcttataatttgcgttcttgattcgaaaatttcagataaaggtttatgcaattaatatttaatgatgtttttttgttaatttaattaatattagttaatataatcaagattagcttataataatattgaataacattattttagtttttgtataatttgcctatcaactgaaaaacagctaatacaaaggagctaatgaagatatgagaaaaattatgcgaatcttattatgcacatcaatcatagtaagcggttgctctttcataccaaagaaccaaacaaaagatattccaaagacggttagcgtcaaagattatgatggtcaatatattggtgaacataaaaaaagaaatgaagtatttctgaaaaaacataaagatgaagcaatcaaaaaatacaaagactacgtgaaagacacctttggttatgattgtaaaattaatttagtcgaggcctatactaataaatctggatttagcgaaaaaagtaaggtagatggtatctcagtggttggtactgtcaattatgacgttccttttcaactccaattgctttttgttgaatctggaaatggcataataatttcaacatttacacctggtcatataaatgaaacatcagcggccgtttcagccatgatgtacaaacggtatgaacatgaaattgaacaagctcgattaaagcttaaatgtgaaattgaaaaagatagctattatgcgatgagcgaaaaacttcaagtaaaacaagaatttaacggcgttacaaggcaatacttgaatttcagaacagatagtatcgatgatctggataagttcaaaaaagaattcaaacctgttatgcacctaaaaggtgatgcattcaatcaacagttacaatctttgattaacaaatatccacaaatacaaaaaatatgaaatcagagttcattgtttattatgataaagaaaaaaatagagaaacagtaaaaaactatgcttggaaccttcaaaaatctataaatgacgttatgcaatcatatcctagcacaaaatttgtacagttttataaagatgatatttccccgtcaatggtagatggaaatggccgtttaaaatcggatactaatgtaatttccatcgagggaggaaagtataatgagaacaaataatcatataaccgatttagatgctattgaattaagcagtgcttggaattacaattcgaaattgataactggcaaaaatgtaaatgtcaataaccatgtttatcgtgttatagataaagttgagcctaccaacaccggactaggctataaattatatgaacgttatgataatgataaaagtagaatgctgcattattaatgatataccctgaaaacattttagtgtaatatacttccttatccaaataatcacattaactttacaattaaatataaaattattagctattataagaataattaagttataattatatcgtgttaaaatactttaactattatttatatttttactttcattataaaaacactcaatatagaggagatattaaaaatgagaaaagtaactggctttgtattgtgtacatcacttattttaggaggctgttcttttatgcataaagatcaaacaaaagatattccaaagacggttagcgtcaaagattatgatggtaaatatattggtgaacataaaaaaagaaacgaagtatttctgaaaaaacataaagatgaagcaatcaaaaaatataaagactatgtgaaagatacatttggttatgattgtaaaattaatttagttaaggcctatactaataaatctggatttagtgagaaaagcaaaacagatggtttagtagtcgtcggtactgttaattatgacgttccctttcaatttagactgatatttgttgagtctggaaatggcgtagctatcacaacatttacacctggtcatgtaaatgaaacatcagcggcagttgcagccatgatgtataaacgttatgaacctgaaatcgaacgagctcggttaaaatttaaatcagaagttgagaaaaacggttattacaccatgaatgaaaaacttcaaaagaagcaagaattcaatggcgttactaaacaatttttgaatttcaacacagacagtatcgatgatttggataagttcaaaaaagaattcaaacctgttatgcacttaaaaggtgatgcattcaatcaacagttacaatctttgattaacaaatatccacaaatacaaaaaaatatggagtcagaatttattgcttattacgataaaggtgaaaacagagagactgttgctaactatgtttggaacctacaaaaaacaactaatgacacaatgaaactttatccaggaaataaaagcatcatattttataaagataaagtttctgcttcacaattagatgagcataaacgtttacaatcagattctcaagaaatctccatttctggaggggagaatgatgaaaaaaaatgatcatataaccgatttagacgcaatagaattaagtagttcttggaattacaatagtaatatttcgaaaaatgacaagattaatgtaaatggtagcatgtataaagttataaaacatcaacaaacaactaacactggactcggctataaattatatgaacgttatgataatgataaaccaacaggaaagttaataatatcgtttgatggtactgattttactgacataaatgatgtaaatactgatttaaggctcgctggagactccattccaaatcaattactggaagcaggaaaagtgtattctgatttaagacaaaaatacaatgatgcaaactctttagatgcagatgcattttacaaaaaatataatttaaaaatcgatgattacaaaggaaaatcaatcacaaatgcagggggtaattcactctctggagccatagcccagtatttaggtgtattagatccaggtcttagcgtaactactacaaattctgcacctataccaaaatctcttacccgtatggctcgtcgagatgcaaataatatacataattaccacagtagaagtgataccttaactagaattaacataggtggacttatgtatcattccatggtcggaaagcacattttcctagaaaatggtgtgtctacgtttggagcattggtacctgctcatactggatacaactttgaagaaaaagagaagttagaccattttgatcaaaacaatattattaacaaggaagtctacacgagtcgcaatggattgaaaatttatgctgacatggatgaacacactccaatatttgtatggagtggtgatgctattggtgctggtatatcaaaaataaaattagacaaaggacatctggcggatctgaatgactatgtgcatggtagattaaccgaatatgtaaataatattgatcttaaaatgaaagacattcgaacatccgttgaacgtgaaaataataattttagtcaacatgtaaatgaaacgaaagatcattttaaaaaagtaataaaacttaacgaattagaaggttggattcacaacatatccaatctgattaggactaaaattgaaagtaaagcggatgaattaaaaggtaacctcagaacacttagagatcaagataatattttagatttagtaggtgccgatcatattattaattcaattattgattttattgataaaattaccgataaaatttcaaaattcattaaatatggtgatgatttcatggaagctgcttttgatatagttagcaacactattgtcaaaatgtttgtcaacttatcagaaggatttgaggatggtgttagagaagaagttttagcccatttgaatgttgtcataccaaatattcaaattatcaaaaatcaagtcactaatttcggtgatggcattaatgatatattgacccaaatgacccatttggatgacaatgtaatggttaacaacgtacccatcaataaaaatgctacaaagcaaacatcaaaaccacttgcagaatctaagaatttattattaaatttagaaatccgaaataaagtgatggaatctggtttggctacacttgcgtcaaatataaatcttttattagtaccagaaacactaagaatcattgcgctcatttctatagttgatacatgcacgtcaacattatcttattttgttggtaagattgaatggattgcctccaaagttccattcgccaagacaacagcggaaacacttaaatctttcaaaaatcttgttgataaattacatcaacaattaactgatatgcgattaatccttaatgaacttatttttacagaatatgttattgttgaaatgcaagactttttcaaaaatgccctactatcagatagccttttaagagatattaaagtattaagttctaatgctaaaggtgacgccgacatgttagaaactgaacttcatgctgttataaacgcaacgtctcaaaacgaaggtaaatctgttgatgcacttaaaaatagtaccgcttctctaaaaaacaatctaaccaaattaaaagagcaactcgataaaactacacattaatttcatacattttgagtgaacagaattatatttccatagcaaacattcctgaactacacatgttacataagagattcacttttgaagaaacgggtaaaatgataaaacaaccgtttttcaaaaaatcaaatattgggaggaataaaaatatgattttacgttacgtgaccaatttaaaacttgcgaaagagctataccaagccagtaaacctaaattgcaagaagataagggtatgattgaactgtttgaacatacttttggcttgcaaaaagaacttgtaaaatacgtcggcattgcagaagcaactactgctgctttatactcagctagctttatcaataaaaacatttctcgcattgcttcgctatcaacaataggtattttaagtgtagctgcttacaaacatttcgaagctggccaaggtaaaaaaggtgcacaacatgcattagatttattaggtcttgctactttaagtttactagatacattttcttgtaataaaaaatagtcttcattttagaagcacatactttagcacctgtgtactttttgattcaattcataaacggtacaccgctatagcatgtgttttattatttttctggtctctttattgtaaatattccccctaatttagcataatcatttccggctaaacgagaaacagcctgtaatgcgtgtggattgattttaaaatcaccctcataaatactgtcatcaatatgataagttacaatttcgcctattattaaatcagccccatctaatacatctccaagcaatatcatttgcgatagtttacattcgaatctcattttcgcgtctttaattcctggcgtcttaatcgttgtagaagttaaaagtgataattctgtacggctcaactcactgtcaccatatgctaacggcgctgcagtctcattaatatcttgaacattatcttcgtctgtaatatgcacaacaaagtctccagtccgctctatattcaaggcagtatcttttctcttacctcctgcacgttgaactgcaatagcaatcattggcggatgattattaactatattaaaaaaactaaatggtgctgcatttactgatgcatcttgatttaatgttgtaacaaaagctataggtcgtggaataattgaaccaattaataatttatagttttctctagcagttaatgattgtgcatcaaacgtatgcataatacccacctcttttcttagtatatctaggtatttctccgatttcggttaatttaaacatctattctcctctgaaaatcacttgtatttatttagcaaatctattgaaatatgacacatatgcatatcttctggatatttttctaaatgttgctgatgttcttcagcacttttaatgtagttagacagcggtaagacttccactgcaattttatctctgtctttacgtcgttcaatgaactgacgcgcttcaattaagtagtcatctacacaactatataaacccgttcgatacttttctccaatatcatttccttgtcgattcacactgtatggatcaataatttcaaataaataattcatgatgtcagtaattgttaacatacgatcatcaaaatgaagtttgacacattcagcataaccatcatacggactgtctaatttagagcttcttccatttgctcttcctacttctgtatgtataattccaggtattgttgtgaaaaatgcttcaacaccccatagacaccctcctgctacataaacaactgccatatttacacctcatcatccttttttatatttttaacaaggttataccatttaataccgccatgacatgattctgatacaccttcattacgatacccatatttttcataaaatgaaattaatgattctcgacatgttaacgttacaccatgtcgatgttgattcttagcaagattttcaaaatagtttagtaagcgacctgcaataccctgaccttgataatttggtgctacaacaagacctaacacactaatataaccaccttcactattatttgtggggacatttttaaataaatcatcgctaatgtaacgctcttttatgacaggaccgttgatatatccaatcacttcatcattcttttcagctacaataaaagtttcttgaatttgttcaattctcaatttcaatgcctctggtgttgcagcttcttccggtgaaaaaccaatattttcaagtgcaataatttgatctaagtcctgcatgattacttttcttaataccataaaaacacttccttagccctatatatcaaaagtaataccttcatctatatattcattattttcaaactaccttcactataaaaaacgagtctttttattaaaagccattcgccttaatcaattagacaagttgtattatacgaatttgcaaataatcatgattataattcattttaagcatactcaaaaagactggtacatgtataccagtctaattagaaaaaatatatttagttaaaaccatttcaaaaacgacttcacttttcctggcttagtcggtctgtctaaataaacaaaattatcattgattactgaactggcatttcgaagtaatgcttcaatgtcattcgaatatttcttcaatttatgattgtgaaataattcttgcatcaaaaatggtctttggtcacatgaatgtgcatctgaagctacaaaatgagccaaattacattctataaattgtaatgataacttttgaatgttttttccaaatccaccaactaaagaactcgatgttaattgactcaatgccccatttgcaacaagttcatataatatttctggatttttggcgatacttctatttctttcaggatgtgcaatgattggtatgtagcctctcgattgtatttcaaaaaacaattgttttgtataatgtggtacttcgcccgttggaaattcaattagcaaatatttcgaacgattaataccttgaatactaccattatctaagccttgcagaatcgaatctgtaattctaatttcttgcccgggaaataatttaatatccaatgcttgaacttctgggtgcgttcttaactccgccaatttcacaagcacttgttgaaatgtattatcatatctcggatgcaaatgatgaggtgtcgctacaatacttgttacaccttcatccttagcttgctttaatagtgcaatactcttttcaattgttttaggaccatcatctatatcaactaatatatggttatgaatatcaatcatgattcatcagtcccataatatgcatagtaactagcacttttatctttaggcattctatttaagactacacctaataatttagcacctgttgcttcgataagttcttttccttttttaacttcatctttattattattttccgaattaactacgtagacaacattgccggtaaactttgaaaataattgcgcatctgtaactgtgttcactggtggcgtatcgataattacaaagttataattcatcaataatgtgtcatacaaatttgcaaatgcccttgatgtaattaactctgacggattaggtgggattggcccagacgtcaagacgtctaaatcttgaatttcagttgagataatactgtcttgataagttgaccaatttagcaataaacttgaaagtccttcattgtttggcaaattaaaaatatagtgctgcgtaggtttacgcatatccccgtctacgattaatgttttataacctgcttgtgcatatgcaactgctaaatttgctgcaattgtagacttacctgcgcctggtgcctctgaagtgattacaatgctttgaactgcactgtcaggatttgcaaacataatatttgatcttatgcctcgaaatttctcgctaataggtgactttggttgttcatggacaattaaacttgatgtacttcttcgtgtattcgtcatggtaattcctcgtaaattaaaatttttgtattgaacctaaaataggtaatcctagttgcgattcaacatcttcttccgtcttaatacgcttatctaataattcttttaagaaaataatcaatattgctaaaacaataccaacaatgatactgatcactaagttgacagatactattggagatacttttacagcattatcatgtgctgaggaaagtattgtaacattatcaacactcataattttaggcatgtcatgtgcaaaaactttagatattctattaacaattttgtcagattcagatttattcccagttgtaactgatacagtaataatttgagagtttgtttgattggttacttttaaaaacgaattcaactcagctgttgaatactgaccatcaaactctctagatactttatctagaattcttggacttttgataatttccgtatatgtattaacggactgcaaactactttgaacattttggaaagctaaatcacttgaggactttttcatgtttactaatatttgagtagaagcagtatatttgtcaggcataacaaaaaaggttaatgccgcacttactacaagacatattgccggtaaaataagcaataatttaatattcttctttagaatatttaataattttactaaatcaaacttttctttcatggtttcctccacataatcaatcattgtattcattatgtatgttttataaatcggacaattatatctagtttaacgacctcaaaaatacacaactacattttccctaattttttatataaatattttatcgtttaaaattatatcatgattctcgactgttatgtataatttatttatattttcgttcgagatataatattgctcaacttcaaatatccaaacctatcagtaataaacctagataccatcgtactctatcatagctttcttataatcgagtagaatcatcatcattacttgattattttctctttacaacaccgagcgtgcccgtactcggtagttcaataccttgcgtaacccgtcactgtgagttgggttaacgataataaagcccacatcttttaaaaagatgtgggtaatttatataatttttatttacattttaaacttatataaaaaagcgcctatgtcatgatttaccatcacataggcgcttatcaataaattattaattattactttccatttcatctaatttatgcggatttcctgtaattagatgacaacttattcttttcaggggaacattacatttttataatatgttcaaagacaaacttaaccattcacaaatataaagaataatattatcaaatcattgaacaaatcgtattttgcaacaattgatatttatattaatgtattgtatttaatttataaaattcatatacatcttaatattctcaatttcgagttgtattgtcaactttatatagattttaaaaaataatctcatgtctttttttacaaaagtaagttaattattacaaactagtaacaaaaattatttcttcaaaaatatatttagtagcgaatacacttcatctttgaattgacttttactttcttccactgctccaaatttttgcgaaaaagatgctttcaaataccaactttcaagaaacagcaatattaaattctgaaagtcttcttttgtcatctttatctttgattcatcatagaattttgctatctctttacttaacgattgatttaaatcttgtatttgtccgtaaatatttccagaaaattcctcaggcgtattagataattgaacgtacattctaatatacctttcttcgatgtcgaaaataaactcaaataagaattgatataaagcatcaattgaatagttcgatttattttgattcatcataataatattattaaggtaatcaaaacagcatttaacactttgttcgtaaatactttttttcgagtcaaaatggtaatataaactcgctttttttatatttacacttttagctatatcatcaagtgttgtaccgtcataccccttctctgaaaataaggttattgcgttatcaataatcttatccttcaatttttataaccccctactgaaaattaatcacactatgttacaggaaaattaagttgcaattacaaatatttccgtttaattataacaacaatctattgcaaattaaaatactatcaattaccatatggcttacaacctaactaacgaaaggtaggtaaagaaattgcaattttttaactttttgcttttttatcctgtatttatgtctatttactggattgtcggttcaatttatttctattttaccagagaaattagatattcattgaacaagaagcctgacataaatgtggatgaattagaaggcattacatttttacttgcctgttataacgaaagtgaaacgattgaagatacgttgtctaatgttcttgcactcaaatacgagaaaaaagaaattattatcattaatgatggaagttcagataatacagcagaactcatctataaaattaaagaaaataatgactttattttcgtcgatttacaagaaaacagaggtaaagccaacgcactcaatcaaggtattaaacaggcttcatatgattatgtaatgtgcttggatgcagatactatcgttgatcaagatgcaccatattatatgattgaaaatttcaaacatgatccaaaacttggtgcagttacaggtaatcctagaattcgaaataagagttctattttaggtaaaattcaaacgatagaatatgcaagtttaattggctgtattaagcgaagtcagacacttgctggcgcagtcaatactatttcgggtgtcttcactctatttaaaaaaagtgcagttgtcgatgttggctactgggatactgatatgattaccgaagatattgcagtttcttggaaattgcatttacgtggatatcgtattaagtatgaaccgcttgccatgtgttggatgttggttccagaaacattgggaggtctttggaagcaacgcgtgagatgggctcaagggggacacgaagtattactacgagacttttttagcacaatgaaaacgaaaaggtttcctttatatattttgatgtttgagcaaatcatctcaattttatgggtatatatagtgcttctatatttaggctatttgttcataacagcaaactttttagactatacatttatgacatatagtttttcaatatttctactatcatcatttactatgacttttataaacgttattcaatttacagtcgcactctttattgatagtcgctacgagaaaaagaatatggctggactcatatttgtaagttggtatccgacagtatactggattattaacgcagcagtagttcttgtcgcatttccaaaagcattaaaacgtaagaaaggtggttacgcaacatggtcaagcccagacagagggaatacccaacgctaaaatcatcgctaaatattgtaagagaaacagcacttatcgctatatcgtgtgtcttttggatatattgtttagttgttctactcgtttatattggtactatatttgaaattcatgacgaaagtatcaatacaatacgtgttgctttaaacattgaaaatactgaaattttagatatatttgaaactatgggcattttcgcgattatcatttttgtattttttacaattagcatattgattcaaaaatggcagagaggaagagaatcgtgaagtatagaaaattaataattttagtgttgagtatcttgatcatattgcctgtaagcacactggatggtcatcatattgcaaatgcagatgacgatccacctaaaaaactgaaatataaagaaaatagtgctctggcattaaattatcaccgtgtaagaaaagcgaattttctgaataatttcatttacttcttttctagtagtaaagaaattaaaaattatagtgttagtcaatcacaatttgaatctcaaataaaatggctaaaatcacatgatgctaaatttttaaccttgaaagaatttttatattacaagaaaaaaggtaagtttccaaaacgaagtgtatggattaactttgatgatatggatgaaactatttatgaaaatgcttatccaatcttaaaaaaatataaaataccggcaactggatttattatcacaggtcatgttggggaagaaaactttcacaacctcgatatgattagtaaaaaagaactaaaagaaatgtataaaactgggttatgggaatttgaaacacatacccacgatttgcataacttatctaaaaataataagtcaaaattaatgaaagcttctgaagctacagtcataaaagatttaaacaaaagtgaaaaatatctaactaaaaactttaaaaagtcgcagaaaactatagcctatccttatggcttgatgaatgacgataaattaccggtaatcaaaaaagctgggttaaaatacggtttttcattagaggaaaaagcagtcactccgaactccaatgattattacatccctagaatattaattagtgatgatgcttttgagcatttaattaagagatgggacggattccatgaaaaagattagacttgaactcgtatatttacgtgctattatatgtgcaattattattatcacacatttacttacacaaattactttaaaacatgaaaatttggagggaggatccttagtattacaattttacattcgtaatattgtgatttttggtacaccttgctttattatcttgtcacagttactgacaaccttgaattaccaaaaagtcacctatagatacttaactacacgcgtaaaatatatacttattccttacatattaatgggattgttttacagttatagtgaatcattattaacagattcaagtttcaataaacaattcattgaaaatgtcctattaggtcaatggtatggctattttatcgttgttatcatgcaattctttattttgagttatatcatttttaaaattaactataacctattcaatagtaaaatattattattgttatcttttattttacagcaatcatttttatattactttacgaataacacagcgtttcacgataccgtgctacactattatccattaagtgaaaacactataatattcggatggattttttatttctttttaggtgcatatatgggttataactacgaacgtgtattaaatttcttagaacgttatttagttattatgattgtattagctgtagctacttattttgtgtttattgcgttagcaaatggagactattggaacgttaccagcttttcatattcattaacaccatataatagtattatgtttattgttatcttgggtatttgcacgcattttaaaacaatgttatttaatacgattcaaatgattagtgctttctcattctttatttatttattacatccaatcattctagactcattgtttgcatatacaaatatatttgaggataatacaatggtctttctagcgatatcactactattcattttaggattatgtataggtgtcggtatgatattgcgtgaattctatatctttaggtttattattggaaaacaaccatataaattgaacattaatgcttattaattattaagctatgttaaaaacacgcggtgggcgaaatcagtttgaattgactgacttcgtttgaccgcgtgtttaatattgttatacatatattctaattgcacatttaaactacgtaaatgccaatgggagtgggacagaaatgatattttcgcaaaatttatttcgtcgttccaccccaacttgcattgcctgttgaaattggtgttccaatttctctatgttggggccccgccaactcgcattgcctgtagaatttcttttcgaaattctctttgttggggccccgccaagatattacttgaataattcttttagaattctaaataatgatccgattaattgaaagaagtctgcagtcattattaattcctccctttactttataaattatgcttgcttagtatcagtcaccttttcagttttcactaaatcgtctgctaaatgatgccaaaaatcttgtaattcttctcttgtgtgcactgtatcagaactatcttgtccgacaaaatcaacatgatcccaatcatgttttgtaggcgttacttgccaaatgcctttttgaattttatccgtcgcatttgtataagcttgattaaatggatgttgagaagaaataacggatactaaaccatcgttttctcgccattctttttcagtagctttaccgattaagttaccagtaatcacaaatgggaaaaacatatttaagtctgctttttgtctatcgctatttaatgctttgtgcgttgcttcaccagtgtatgttttatacacaatgttagggttcaacgacgttttacgatttaaatctgttgcaccctcacgcgtcagatcgtaaaatccattatcttttgatttccataaattagattgtttaacgcgtttgacataatcaatatatgattcatttggcttctgttttagaccccattgagccaacccgaagtctactcttgaatttttattaccaaacattttaccgatatcaaatacgatttgtttcactaaagcttcattaccagctaaatctgatgcgtgtgtaccattatgtggtgttcctaaagtagtaattgatgaaatcatattgtcattattacctttgaatagtggagaaatttcgccaccatgtttcttttgatactctatttcttcacgattaccattacgcagtaattcttctagttgacgtatcgtttgaccgcccatactatgtccaactaggtgtaccttctgtcctggtttccagtctttgtaaattccttcgtatgtttttccataacgttcatgtccatattttgctgcatgtgctgcaccataatctacacgaccgcctttgatataataataaagttcaactgcgcggtcatagttgcttccaaaagcacttatacttgcttcataagctttgtaaccattttcttctaaatcttggcgaatgttcattttattaccgccccaataatgagctaacactgaaggattaatatcatctgtaaacccattgaaaccatgcactaaaacgataggatcttgatttttatactgcccttgtttggcaactttattcgtttgatcacctttcgcttttgcagtaagttcctttgtccctttatttggtaacgttgctactgcactactttttaataaatttaatccatttttcttgtcattgtcctttgttggttctactggtgatttttgattgttttttaaatctgaaactgatagtgttttttcgtctttttgaggcttcacttctttttcattgttaaaattgtagttagtaattttatcattcgcttgattattttgttgtggttgtactttttctatttctgtcttattaacaatttctggttggcttgtttgatttgacttatttaatggtagtgcttcctttgttcgactttgtgaaggtagattgttattagcgtttgaatcttgactattatctgcctcttttgactgttgctgtgacgccactttactttgtttgccatcattaatagcctgttctaacccttgatttacatcgctaggattagcattgctattttttgttgtatcacgttgaatatttttattattaagcgatgactttttatcatcctttagttgatctttattcaaatcatctgttttacgatgattttcttctgatattgttttatcattatgcaagttcttagttaaattttcagtatgttgctgttcgtcaacaccgttttcacgttgataattagcattttccctagtttgttgatccccaatagattgtgctgtaactgtatcctcctgtgaatttcccatattcacttgcttctcagctgcttgtgcttgtccaccacttaaaaatagtaatgtagctattaaaatggaagatgcacctacactaaatttacgaatactatacttattttgacttttcatcattgtcagcacctctatttttttattttagataaacaaattgataattattcgaggaataaactcaaataatttacttaaccaagcactcataatgaccatcctttctattgtttaatttgacgagaaagcgtttacatttgtatttaaaaaatatattctccaaagagaatttaaagtgtatacgctaatcatttcaaattattaattaatattatatttggcaaaatttaattagtcaataattagacacaatttaattatgcaaattgtaacttttttacatatatcttttgtgatttttaatatttacatgcttgggtcttgattccaatgatgtattattttttagattagctgtatggggggatttatgagctatcacagttataatgtttgctggtgtcgtattttaaacctaaaaatatcatttcttctacaatgattgtatcaggataaaccattatgctcgtaactttgattgatatataccattgcatgttctcttctcaaagtatatgtcgtgttatttttaatttattgtttaattactcttgaactagctttaacttaatctcgaatttatgatgattagcataaaaatacaccccataaagttagttttttagtccaactttcgggatgtacatcttagttctaatgaagattgtcttttaaataggctatgacatttctatttcaggctagatatatttttattcacagtataaatacaaagaatataaagacaactatgatattaataggtagtaacgacaaacataactttttagctttttcctgtaatgaatattttttacttaattctctctcaataaaaaatgtacttccaattattacaataaatagaagcatatataataaaaagttcttagtgaataagtctgtcattggtaacgaaaaaataattaatgcagttgcttgactcgtagtaaaaaaatattcattgaataattttttcatatttttcacctacatattattacaagcaatagatccgccagcataaagtgctgccattccagtaccgacaccccagccaatagaaccactaacacctagagcagccatcgctcccgttgtagcagttgtatgtgcaaaaccagttacagttagagcatctcaagtatctctattgcttatagtattttttctgttgtttttctacttctttattaaaggctactaaattctctttagcttttttcgccaattttttcccttcataacttcattatatcgattcatatacttttcgacatctttaacagtgacatctattcctgagttgctcaatttacttttcataattatctttggtttcgtatcgtgattatccactagttatctatgacgagttcgcaactttagtaccatcacagcattcatagttaaaagatgttggttcgtattttaaaattgaaaatgtcacgttttccacaatatttgtaagtgtataagccatgatccttttctctatatctcagtccatacttgctttaccactgttcgatattttgtcgttctcctttaaagttattgcgcttatgatgtctacgcgctaattctgcctcaatttctgaaaaatcgacgcctagcgcatgcatcaagacaaataaatgataaagttcatctgctacttcacttacaaatgcttttttgtcacctttaattgcttcaattacgacttcaaaagcttcttcaccatatttttttgtaatcttttctataccttctgttaataaatattttgtatatgacttttcattattggattgggcactatcttgaactgtctgcgctaatgtttgcactgaaaatggaacttctgtgttaaaacaactttgactgcctgtatgacatgttggtccatttggtatgacatcaattaaaatagtgtcattgtcgcaatctacatgaatatctttaacacgttgcgtatgaccagatgtttcaccttttgtccatagacgttgtttcgaccgcgaatagaaacataccaaaccatcttctatcgttttatcaaaagcttcttggttcatataacccaacatcaatacttgctttgtttgattatcttgtaaaattgctggcactaaacctttgctaaaatcaattttgtaattggtcatcttactgctatacccccttgccgtatcacttctttaatagattgaaccgtcgtttctcgatcatgtaatatacttgcagctaaacctgcagaaacatccgtctgatcaaataattctacaaagtgttgtgcactgccaccaccaccagaagcaatgattggaatatttacgagagattttatttttgcaagatgctcaatatcaaagccttgcttcataccatcatgtcccatactcgttacgaggagctcacctgcgcctaactgttctacttgctgtacccagtcatatactttaatatttgtcatttttttaccaccatgcgtacaacaataatgtgcttttctttcaggatcataatagctatcaattgctatacagatgcattgtctaccgaatttatcactcgcttgtttaattagctgtggattttttaaagcacttgaatttaatgatactttatctgcaccatgatttaacaattgggtaatatcatcaaggctttgaatcccaccccctacagtaagagggataaacaagcgtgacgctgtctgttcaatcacttctaacattaagctatgaccctcttccgtcttagagatgtctaaaaacactaactcatcagcacccgcttcattgtaatacattgctaaatcaacaggattcccaatatcccttaatcctttaaattgaatccctttaacgacacgaccatctttgacatctaaacatggaatgatacgttttttaatcatttaagcccctcccaaaatgatgcttgatgtgcggcctttcctataatagcagcgtgaacatttagcgacgctaatcgttgaatatcttgctgatgtctaataccaccagacgcaatgacaggaatcgtcgttgcctttactaattgaccagttaattcaaagttagggccggacattttgccatctttagcgatatcagtataaataatgcctccaagaggtatatccgataactgtttcacaaaactaaataaattcaactctgtgtcctcttcccacccgttcactttaatatcctcgccataagcatcaacagataaataaatgcgacctggaaatgtatgtgccatctctttaagccaatcagcatcttgaatgcctttcgttccaactatgcaataattaatccctgcggcaaagtagtccatgatttgtgacttcgtacgaatgccaccacctacttcaatatctttggttgttaatctcctcaatgacttaatataatcaaactctcgggcatgctgtgccttagcacctatcaagtcgacgatatgaatacgattcacacattcaaattgactatagtaagcaatactttcttcagccgaacgcgacattttttcttcactatcatatttaccctctgttaacctcacacttgttgacccaatcaaatcaatcgctggccataattcaatcatttataaatcccccttgtattgcctgacgcaaaatttgtaacccatatgtaccgcttttttcaggatggaattgaataccaatataattgttaaattggacgattgctggaatatcagtaccatactgcgcatatgcaattacattttctgacatcggcgcttggtaagaatgtacgaagtaaacatcttgatttaacataggatgcttactcactaaattattccaacctaagtgcggcactgggtattctgtttggatacgcgaaatatttcctgggataaaccctaatccagatgcatcgccttcatcactatgctcatacattaattgcatgcctaagcaaataccgatcattttcttatcagtattcttagccaatattgcatcgagatttaatcgctttatctctgacatcgcatctttaaaatgaccgacacccggtaatatgattgtttctgcttgatcgattatattttgcttatttgagacaaccacctcataccccaaatgttcaatagcgcgttttacattactaatattccctaatccataatcaacgatgacaatcattcaatcacacctttcgatgacggcacacgctgatcatcagttgcagttagcgctatgcctaatgcacgggaaaatgctttgaatatagcttcaatttcatgatgtgtattaccaccacgaatcaaatcaatatgcgttgttaatcttgcattgattacgactgctctaaaaaattcttcaactaactccgtatcaaacgtaccaactttttctttacttaacgttgcattgaaagataagtatggacgcccacttatatccacaacgacacgtgctaatgtttcatccattggaatgtacatcgttccataacgaacgaaatgctttttatctttaatcatttcaagtaacaattggccaatgacaatgccgatatcttcagttacgtggtgatcatctacgtcaatatcaccttgtgcctcaatgtttaacgacagtccactatgaaacgtaaacaaggttaacatatgatttaaaaagcccacacctgtattaatatgcgatggtgactgatcatcagatattgaaatatttagttgcgtttcagctgtgtttcgttgtttttgataaatcatattttgtactccattctttaacaatttcttctaattgctttaactgtgatgctgttgcaattgaatatcttacatagcctttcattacctgctcatcataaaaacgaggtttaaatccttgttcatatacgtattgtcctaattgttgcgctgctgaacctttagtaagtacaaaattagcatttgatgggaatactgacattttatctgcaacatgtgtatcaaatatttgttttaactgctcagctaattggcgttgcattgttaaaaatcgacttgtctcttgtctatgtctaaaaatataagtcgcaatatttagcgtaaatacatttaatggatatggatgttctattttttgaatacgctgtatcgttccagcagtactaattaagacacctaatcttaagccggcaattccaaacgcctttgataatgtacgcattcttaaaatgtgtggtgccaattccacgtcatatgccatgccataatctaaatatgcttcatcaatgacaaagtatccgtttattgctttcatcttatctgcaatagctgttaaaaatgctatatcaaattgcttgcctgaaggattatgtggattactcataataaaaaatgatggttgtacctcatcgattttcgttaaaatggtttccaaatcaaacgttaaatctgatcctgcatctacaaatgcaatttctcgatttacttgtgccgcatatgcttgatacataaaaaaatctggatttagcgttaatgccggaccttctggcattatcagcattaacttctgaatcaattcatcagagccatttcctgcaataatttgttcaggcgataatccgtaaaacttagcataagcgtccttgaattgttcatatgctgcatcaggatataaattatatggcgttgcactaataatagacgtcattgttttttcatccaacggcgtaattggactttcatttttatcaatataaatcatttcaattacactcccctaagactgacgtattaaaatggactgttgatgattgtataatgcttcaacatgagcaatatgttgtgctgaatcagcaatttgatcaaatgtatcttttgataaatgaatgaccgtgttccgtgttaagaaatcattgaccgataacccattagtaaatctagctgttctatttgtaggtaatacatgactaggtcctgcaacgtaatctcctatgacctctggcgaataatgtccaataaacaatgcgcccacatatttcactttttcaatatatggttgaggatttactgtttgaatcgacgcatgttcaggtgcgattgtattcatgacatagcatgcttcatcaaaattactagcatggataaggtagtgttgattagcgatacttttagaaacaatgtcgtatctgtccacattaggcaatgctttagcaatacgtgattctaaatctttaaggacttgcgcatcttcactaatgacatatgtacgtgctaattcatcatgttctgcttgcgcaaatacatcatatacgatggcatctaaatctgcggtgtcatcaataatcagtgctatttctgttggtcctgcaatttgatcaatacctacctgtccaaataaatattttttggcatatgcaacaaattggtttcctggacctacaatcttatcaactttaggtattgtttctgttccataagtcaatgcagcaatactttgagcgccaccaacttgaaacacttgattaacttgcgtaatataacatgcagctaatacctctttggatactccgttaggttgaggtggtgtcacaacaacaatattttctacacccgctacttgtgctaaagtcgctgtcattagaaccgttgatggataacttgctttgccaccaggcacataaatacccacactttctagtggatggtatatttcataacactccactgatttttctaactgttgattcgtctgcttaatactttcttgatatgctttaattctttcataactttgttgtaatgcttgttttgttttttcatctaatgtgtcaaatgctgctttaatttgttcatgactaatttctaaatgatctgttttcgtatgatcgaatgttagattatacattttcaaagccttatctccatgaactttaacttcctgacaaatatcgcgaataattggatacaatgactcatctaatggtgcttctaatgaaaattgatttaaaaattgttgtgcattaagcattggctatagacacctccaaagagcgaataaattgctcaattaattgtgattttttaaaataagcagctttattagtgattaatcttgcattgatatcactaatatgttgcttttcaaccagtccgttcgcttctagagtagtacctgtttgaacgatgtcgacaattccgtctaccatatcgacgacacaagctaattcaacagaaccactcaatttaatcaattcgacatcaatgccttttgatttaaaatatgcttcggcagtatggacataactcgttgcgattttacgataattggtcgtttcaggtttcgctgcaaccgcaaaatgacatgctccaaaaggcatatccaacaaattattaacattgtaatgacgctcatctaaaatgtcgctaccaacgataccaatatctgcaattccttgttccacatagattggcacgtcactcccttttactaaaatgcattctatattatctacacttaataataattggcgttctctattttttaatgtttctgataatgtcgtaaattcaattgcatctaaatagttaattaaactatccattagacgcccttttgctatggcgattcttaacattgtgcatactcccttacttaaagtgttaatcctaatccaaacccttcgatgcttcctttgtaataaccacctgttaaaactcgagattcattttcagcaaaatgacattgaataaataaacctgtgtaataggatctaggtggctgcgcagtaatatctaaatggatatcattgtaaccttgtgtatgtaaccaacgttcccatatttttaattcaacgagtgctggatggtcatttggaatatagtgctccaatacatttaattgttgttgcgtattctctttcaagatttgcacgattggatgttcagtagacaaatatgtaaccagtcctgataaattacgttcctcaatcattgatagtatgtctggtgtttgtaacgatttatcgagtaaggcatcaagcaattgataatgtcccaatacaacaaaatgcacgttgtctctcaactgctgttgaataaactgaataaatagctttaagctctgttgtacattcgctaatgatggtgcatagttttccaaaccaacttgtacagccgcttcattattccgaatgattaaacctgtgtatgccacttttgttgctgcagttggatacattgagtaataacgcaataattgatctgtaaaatcatttcgaagtgcataaatttgatgctcatgttgccaaaaatttcgctcacccatctgctgcaaatcctcatggttcaattgtttccagtccaacttttcaaccacactaaaatcaactaactcataatccgctttattaaaatattttaaaaatgctgtttccgattcttttaacgcaattaattgttctgaattattcactcgaccaccctttactttcaatactgtatttaaaatcacttggtatttttgtcgttcgctttacttctctaccatactaaagtgtaatatgcttaataacttatcatttttagcaatacattacaaccttttttcagaaaattcggtgtattggttttaaattttttcaaaagaaaaaggcaagacatttgtgcctataaaaatgcttaaccaagatttttatattgaagttgtacttcttgcacatattgtccttgccttattatgtaaagttattttctttctatctttttattaaatttaactattcttcataatcccgattacctttaaagaattgtctatcttttttactatatacattttcaggattaaaaaatggtttgagtttatatttaaattcaaataagtttagaccatcaatcgcaaccctatcttggtaaacgttcgttgctgatatatctgtaaaattgtttggaccgacacctgcaataaacttaaactctgcttcatctaccaaataatcatacgcttgtgtatgtctatcctgtgcgccatgtggaaatacaaacatatctgttttacctacaattggttcaacttcatctttccatcttttagtatcacgtttaataccttctaaagatgttttttcaaaattaatgtgaccatatgaatgactcgcaaatgaccatccatcccgtttcattgcgcgaacaacttcctcagctgcctttttattctttgtataatctttactcgttaattcattcgtgcgataacctaatacgccctcataaccggttaaagcaacaacacctttttcaccatttaaagaaaaatctggatgctcttttacaaatttatttaaaattggcacgatatcattgtcatcagaataagtagcatggccttttgagtctgtcgtttcagatacaacatgcttatttttatcaagtactaagcggtcagcataaccatggtgtctcatgtaactatagtaattcatatcatcaattgagatgattagtggctttttacctttcggcaattttatttttttggcttttacatgatgagatgataagtcgtatacatcatgtggattaacgatgatgtaattatttttatataattcgttcaatgattttttaaattcacttacagtaatcatccaatcattgttgcccttagcttggtgtgtatctcctgtaaacgcaacttttgggtctgtaattaatggatgataaaacacatgataaacttgaccgtgatatgtttcccaatgttcatccattttcgatttatgctttgcatactcatttggattaacagatttattttgagctttctcattttgcttggaacagctatataacaatgcaactgataataacagaaaaaatagcaataaatattttttatgcattaaacattctccctatgttttattatgcacaattataacatttttattatgtggctcataactttttaagaaactgttgggattttaattttattttttagataatgtcatagtattttatttataaaacacaatatctccttgactgataatgtcgtccattgtatcgtctcgcttgaaattaagcctttctgctaaatttattgaacgttgattacacttctttatgtttgaattaattgactagggtataacaatagtgtggtgttttataggtcattctttaaatacatcacagaaaaatattcgaattcgaaataaaatgcttgcatctttattttgtaggtggtattgtatgtatatcaagtataaaaaatatatctaagagataaaaatatggaggttttatattatgactaactttacttttgatggtgcacacagtagtttagaattccaaattaaacatttaatggtttctaaagtgaaaggttcatttgatcaatttgatgtagctgttgaaggagatattaatgacttcagtactttgaaagctactgcaacaattattccaagctcaattaacactaaaaacgaagcacgtgataaccacttaaaatctggtgatttctttggtactgatgaatttgataaaatcacatttgaaacaaaatcagttactgaaaacaaagttgttggtgatttaacaattaaaggtatcactaacgaagaaacattcgacgttgaattcaacggagtaagtaagaatcctatggatggttctcaagtaacaggtattattgttactggtacaatcaatagagaaaaatatggcattaactttaaccaagcacttgaaactggtggagtaatgctaggcaaagatgttaaattcgaagcatcagctgaattctcaatctcagaataacctcatctcataatcctcattgattttaatatatatacgaaatgccaactataccatccctaggtatagttggcatttttcgttcaactcatgtgtaacaagcactaactgttcaccctaatttaagacacctttcattcaggtaagtcttattgaaactgataactttggtgcccttttgcaaagccattaaccgtataaagcatagatcctccgcccatttctatatcattggaacaaatgatgagttgatttgtgccaggtataaattgcggatgcgtagaacgtaacatatgcccttcatctcggcctggtatcaatatttgtcctattggataaccccttttattaaatactaatactcggccttgaccatacattgccacatataaattatcatctctatcaatacaacatgagtctggtccttcatgacctgtaaaatagtacggtatggtagctccaaatggttgtatcgtcacaccatcatcttcaagtgcaatgcgatgtaatcgattggctgttgtttctgttacccatagtactttttcatctgtacttaaagcaataccatttgctacgctaatattttgaatgatcggcgtcactgttttaaagtccggcgcaacataataaacgcctcctagtgggttggtagagtatcctctaaaatctgtaaaataaaatccacctttagaatcaaataccatgtcatcaatacaatatgttgttgaaagatcttcaataatatcttgtatgttgtcaccattttctgtagttgcaaaaatgcctcctgtagatttaaaatctcctaaataacaaacgaataatcggccatctttatgtattttgattgctgcaggattcgctttatgacttacaaaaggttgtttaatttccttcgtttcaggattgactttgaaaatattaccttcgaatacatccaataaaaatagttgtccttgccgatcaaagttcaatccttctaattgcaatccttttttggaaatttcaagccatggttcagctgtaattgtttgtaattcactttcagatataattggaacagcactattagacttcccgctataaaataatgtaggtaaatcttgttgtgacatcatgatcattcctttcatttcattcgttttaactatcatttttattttaaacaagggaacatttaaatcaaatgataacgtttccatttatctattttatcggtctagtggctgatttcaagctagaaatattgaatgacaatacaactctgttaaaatgatggacgtagacaaatatgcgtattgacgctttattttaaaaattaacatgcttataacatgtttatagaaggagattaacctatgaactatcaagttcttttatattataaatatacgacgattgatgaccctgaacagtttgctcaggatcacttagccttttgtaaagcacaccatttaaaaggtagaattcttgtttctacagaaggtattaacggcacattatctggtacaaaagaagaaaccgaacaatatatggcacatatgcatgccgatgaacgattcaaagatatggtgtttaaaattgatgatgctgaaggacatgcttttaagaaaatgcatgtacgtcctcgaaaagagattgttgctttagatttagaagatgacgtcgatccaagacacacaactggccaatatttatcacctgtagaatttagaaaagctcttgaagatgatgacacagtcattattgatgcacgtaatgattatgaatttgatttaggtcatttccgaggtgcaattcgtccaaatatcacgcgctttagagatttgcctgactggattaaagagaataaagcgttatttgcagataaaaaagtggttacgtactgtactggtggcattcgatgtgaaaaattttctggatggcttttaaaagaaggtttcgaagatgtagcacaacttcacggcggtattgctacatatggtaaagaccctgaaacaaaaggtcaatattgggacggtaaaatgtatgtatttgatgatcgtatcagtgttgatatcaaccaagttgaaaaaacaattattggtaaggattggtttgatggcaaaccatgtgaacgttatattaattgcgctaacccagaatgtaataagcaaatattagtttcagaagaaaatgaagccaaatatttaggtgcatgctcttatgaatgtgctaaacatgagcgtaatcgttatgttcaagcaaacaatattagtgataacgagtggcaacatcgtttaacaaactttgatgatttacatcaacatgcttagttttaattaaatacctatcaaaacacgctttgaaaatccgatttataaaggtttttcaaggctgttttttatgcgcatacataacctgatatgtttttaattatgcgcatattatactaaattaaattttaatactgcggggtgtcttaaaatgcacattttagtaacagggtttgcgccttttgacaatcaagatattaatccttcttgggaagctgtgactcaactagaagatattattggcacacatacaatcgataaactaaaactaccaacctcttttaagaaagtagatactatgataaataaagcattagcatctaatcactatgatattgtgttatcgataggacaagctggtgggagaagtgccatcacaccagaacgtgttgctataaatattgatgatgcgcgtattccagataatgatgattttcaacctattgatcaagccattcacttagacggtgcgccagcttatttttcaaatttaccagttaaagcaatgactcaaagtattattaaccaaggacttcctggagcactttcaaatagcgcaggtacgttcgtatgtaatcacgtactttatcacttaggttatttacaagataagcattaccctcttcttcgattcggatttattcatgtgccatacataccagagcagattgatggtaaatccgatacaccatcaatgacattagaaaacattgttacagggctgactgcagctattgaagctatttctgatgacgatgatttacgtatagctctaggcacaacagaatagttaaaagagtaacaacaaaatacattccttaaatgactaacaaatttgttaatagggtaatacttacggaagtatgttttatttataggggaggaattaataatgactacaaaaacggtatttgatgtcattgatatgggattaggatatttagtaaatgtgtacgatacttggaaagttgaaaaggtacttgatgattatcataagcctttttctaataccattcattggcaatttgggcatgtattaacaatttttgaatcagccttagctgttgctggtaaagagaatattgatttaaatatatatagacctttattcggaaatggttcgtctccagatgaatggaaggatgaagtaccgagtattgaaacgattttagaaagtctccaaacattacctgaacgtgcacgaaatctaactgaagatgatttagcaattgaattgaaacaaccaattgtcggttgtaataacttagaagagttattagtattaaatgccattcacatcccacttcatgctggtaaaattgaagaaatgtctcgtatattaaaaaatttaaaataaatatgtgcttattaaccgttaacaacacgttaacggatttttttatttgtttaaaaggccactcttttaaatttaataaacaccaactataccagttcttcaccgcttctcgaaaaataattatattaatgatttcgttaatttaattttatatttaattattactgtacatcttttgaagttagctttattcttaaattgaaatatgtataaaacatagaaagaaggacgttttaacatggaaaacacggttaaatatcgtaagtttatactccctatcgttgtaggtctccttatttgggcacttacaccttttaaaccggatgctgtggatccaacagcatggtatatgttcgcaatattcgtcgcgacaatcattgcttgtattacacaaccgatgccaattggggctgtctctataattggatttacaatcatggtactcgttggcattgttgacatgaaaacggctgtcgctggttttggtaataatagcatttggttaattgctatggcatttttcatttcgagaggatttgtgaaaacaggtcttggtagacgtatcgcacttcatttcgtcaaattatttggtaaaaaaacattaggcttagcatattctatcgtcggtgtagatttaattctagcgcctgctacaccaagtaataccgcgcgtgcaggtggaatcatgttcccaattatcaaatcactttctgaatcatttggttcgaaaccgaaagacgaatcatcacgtaaaatgggtgcatttctagttttcacagaattccaaggtaacttaattactgctgctatgtttttaactgcaatggccggtaacccccttgcacaaaatttagcatctagcacatctaatgttcatattacatggatgaattggttcctagctgctttagttcctggacttatttccttaattgttgtaccttttattatttataaaatttatccaccaactgttaaagaaacacctaatgctaaaagttgggctgaaaatgaattagcgactatgggtaaaatcgctttagctgaaaaatttatgattggtatttttgtcattgctctaacactatggattgtcggaagtttcattcatattgatgcaactttaacggcctttattgcgctagcattgttattattgacaggtgtcttaacatggcaagacattttaaacgaaacaggtgcttggaacacattagtatggttctcagtattagtgttaatggccgaccaattaaacaagcttggatttattccttggttaagtaaatccattgctacaagtcttggtggcttaagctggcctatagtactggtcattttaatattgttctacttctattcacattacttatttgcaagttctacagcacatatcagtgcgatgtatgcagcattactaggcgttgccatcgcagccggtgcaccaccattattcagtgcattaatgttaggtttcttcggtaacctattagcttcaacaacacactatagtagtggtccagcgccgatactattctcttcaggttacgtgactcaaaaacgttggtggacaatgaacttgatcttaggtttcgtctactttattatctggattggtttaggatcgctttggatgaaagtaattggtatattttaaaatatttaaattagcgctcgaatctcattgatttgggtgctttttaatttgtatttaaaatcaatccttgctaaatcaagactccctttttaaaatacgtttatcttttaaatcattgcatacttcactgaaaatttgtataaagatttaagtcattacgtaacatcacataaaatacatttctatactaatccgcttcattgattaacattacgtattccctcataaatcataaaataaaaaaacaccttcgtttaaattcattttaagtgcgaattcaacgaaagtgatttatttcatatttaatgttttaaatttatacagctgtcactgttactgcacacatacctcagtcttacctaaacatggcacaaatagaaaatgatcacatatacaatttagcaactttctcactttaatcattttacagggtttttgcgaccggatgtttcttcaatttaatgtattgagaaagactatataacacaatacctgtccaaataaatataaacgtaattaattgatctatactaaaaggctctttgaaaacaaatatgccgagtacaaacattattgttggtccaacgtattgaataaatcctattagcgaaagtggaatacgttttgctccggctgagaataggattagtggtattgccgtaatagcaccagaaaataataaccaaaatgatgacatgttcaatccaaatgacatctgatgttgctgccataaataaataacgtatattagtccagcaggtgcggtaacaatacattcaatcgtaatactgctgatggcatcaatatgtactacttttttcaataatccgtatgtaccaaaggataacgctaatataatagagacgattgggaattctccaatcttgagcgtcatatataatacaccgatgaatgcgaataaaatggctaaccattcaaatttattgaatctttcttttaaaaagataagtgcgagcaaaatgctaacaagtggatttatataataacctaaacttgtttgtagtacgtgaccgttcgttacagcccaaataaatgtaccccaatttaatgtaatgacatagcctgctacgacaatcgctaatagctgaatgggcttgcctaacaattgattcatatctcgttgaaatgcattgcgttgtttttgtccaaccgcgagtatgaaaatcatgaatattgctgaaaatataatacgaaaggctaaaatttcaaacgcgcctattgcatcaacgaactgccaatatataggtagtattccccacagaatgtatgcactgagtgctaaaaatataccttttttatattctgtattcacttacatacctccttactctcccaaatttttaacatgttacgctcacttagttaagctaatataacgattttactaataatatttcgataaagatatcattttgtttatatttcccacatttattcaccaaccactaaacaatattaattttataaataattctgtacaaatcagggtatattgccagaaagactaccatacaacataaaggatggatacaaatgactttacctaaaattggaaagcctgcaacacgcgcgttaaattcacaaggaatatacacattagaagcagtatcacaatatacgaagtcatctctaatggagatgcatggcgttggtcctaaagctatatcaatattggaacaagctttatttcagcaccaactacattttaaaacggaagttcattcatcattaccttttttattaacaggagatgtgtcatgcaatcatgcgcctaaacgtcaacaaatgatagattttatagttgctacagcagcattagatattgaattattacgttcactggttacaacagaatttatttggtctgtccctggccgctttgacatatacggacctcaaatattaattcaagaactatctaatcattataaagagattgcttctctcaatattcaatccatcatcacacatgggtgcttaggttccatgcatggtattgaaatattaaaaactggtaaagagattcattttgctcatttttttgaatttgaaaatcataaaaaggatgccaagttaagcaaagtgacatcttacattgttgttggttaatgtatcgaattttatatcgcaaaaaattcttttgcagttacatgtatatttttatataacaaataattttgcataacatttttgttatatgaacacttattgctagagtgcacattgaacatacagtatgattaaatatcatgttatgaaagaaggatatattttgactgtttttaaaaatgagcgcttaagctggttaccatacatagctattgtcattttgttacacgttattgggtttagttttttatggattgctggaaaagaccatcatatcttatttggtatggggattcttgcatatacattaggtttacgtcatgcatttgatgctgatcatattgccgcgatagataatacggttcgcaaattattacagcaacgcaaagatccatctggtgttggtttctacttttcaattggacattcatctgtcgtatttttaatggctgtttttttaggggtatctgtaaaatgggctaaagatgaattaccacatttccaagatattggcggaacgattggtacactagtttcaggtttctttttagtgcttatcggtgtgttgaatctaattattttaatctctttaattaacttgttcgctaaattacgtcgtgaacacattgaagaagctgaagtcgatgcattacttgaatctagaggatttgtttctcgatttgtaggaccttatttcaaattaatcacgcgtagttggcacgtattgccacttggctttttatttggacttggttttgatacagctagtgaaattgcgttactcgctctttcttcaggcgcatcacaacaagccatttcatttatcggaatcttatctttaccaattttattcgcatcaggtatgagtttgttggatactttagatggtgttgtaatgaaatatgcctataattgggcattcttcaatcctattcgcaaaatctattacaatataacgattactgcgatatccgtcatagctgcattagtgattgggatgattgaattgctacaaattcttgctgataaactagacttacatggtgcattttgggcatttattagttcaatcgaatttgattatttaggttatattctagttgctttatttttaattacttggcttatttcaagtttaatttggaagtttggtcgcatagaacacaaatggtctaaataaagtaacttgtcttgcaactacctttgtattgttacatttttagacatcctgcacacttcttccattatgctacgctctcagtagtcatctttaaatcgtttcttttagagatgacttcattttgagagcgtatttttctatttaaaatgtgtttatccaaaattcaatactttcgaatttaaagtttcagcatttctgtttaaaatttaactataatctttaatacaggaggcgctatgtttatgaatattgcgaagttagagaattatttacaaattgattcatctcgttataatcgaccgagtattgaagcattaaattattatgcaactcgttttatgttaactgtaccttttgaaaatattgatgttcaaaatagtaagccgatatctataaatatcgatgcactttttaataaaattgttcgtgataaacgtggtggtttttgttatgagttaaatacatttttcaaaacctatttacaacaaaaaggatttaatcccgaattaatgtcagctactattcatacacccggtggcggtcgcagtctgaacggttcacatgcttcacttgttgtttctataaatgatgtattctatgtaactgatgttggctttggagacttacctctacacgccattcctattacttcgtcagagcatacacaaccgattactgacatcagtggtacgtttcgtgctatctttaacaaccaagacaaggatattttctatgttcaaaaattcgaaaatgataattggcgtacaaaatatgaagctgaatttaaagctaaatgtattgcagattttgataaaaatattaaatataatcaaacgcatccagattcaatatttgtacagcatttattaattacaatgccacaatcgtttgaccgtgctacaatgtctgaaaatcatttaactttgacaaaagcaaaggatggcatctcagaaaagttagctgtcactaaagataactatcaacattttttgaaaacatattttggcctagatgttactatcaatcgaattgaaaacagtgacagtaaatcataagcatacggacgtgacttactttaatgtaggtaacgtcctttttaaatacacatattcatcagggaatgggacagaaatgatacagtgccactaataattgatgatttagtggttcttacacattagccaaagctcgtgtgtacttataaataggcattcatgagtaaaactgatgcacataaatactaatttctaaagaaaaagtatttctttatcgacactctgcgcaaacacaacaaaaaggatatggcacaaacttcatgccacacccttcttttgaaccgcttcattttacttaagcaagtgcatctacaacataaatgacacctacgaataaaaatgcaatagcaatcatcgtcgaaataaagacgatacccattaatggattaaataataaaatgacaccgaaaacaatacctaataaattaaaaatcactgaaattagttttaagctaccactacccgaaaacgtaaataatccagcaatagaactaaaaataaaccaaaaagcaaacatgtagataaaaaatgccgagctagcaccaacattaaaaatgacaataagaccaaagagaatatctacaatccccataaacagaatccaattttggttaccgccaactaaagctttggcttttctacgataaacaatttgaatcacaccattaatcaatacaaataatccaattaaccatgtgattgcataaaagttttcaattgggaacgtaaaaataacaactgctaacattaataacagcacacccataatcaaactagaccatttaatgccttgatttcctttttccataacaatcatttcctttcaaacaacgccttctttatattttcattagtaccactattgttcattgattaaattccctcatcttaacttatagaaacatttcctcagtgcaaatactgcgatgctcaaattagttgaattgctttccaataatccaaattcacccgagaaaatcacgatatattaatatctttcaactatgtaagattcaaacattgaattgtaagtttagataaaggctactgttctacttattatttaaaatgaaattaaatacaaaaggagtgatactatgacgatattatcagtgcaacatgtttcaaaaacatatggtaaaaagcacacatttcaagcacttaaagatattaactttgacatacaaaaaggcgaattcgttgcgattatggggccttctggatcaggtaagacaaccttattaaatgtactaagttcaattgaccaaatttctagcggtagcgtgattgctaacgggcaagagcttaataaacttaatcaaaaagcacttgccaaattccgtaaagaatcattaggtttcatcttccaagattacagtattctgccgacattaactgttaaagaaaacattatgttacctttatctgttcaaaaaatgtcgaaggcaacaatggaagaaaattataaagcgatcacgacagcattaggtatttatgacctgggaaataaataccctagcgaattatctggtggtcaacaacaaagaactgcagcagcgagagcatttgttcataaacctcaaatcatatttgcagatgagccaacaggcgcactcgactcgaaaagtgcaaatgacttattacaacgtttggaagaaatgaataaatcgtttgataccactattgtcatggttacacatgatccggttgcagcaagttttgcagaacgtgtcatcatgctaaaagatggccaaattcatacacaactttatcaggaaggacgttctaaacaggccttttatgaagacattgtacatcttcaatcagtattaggtggtgtctcaaatgacatttaaccatatcgttttcaaaaacttacgccaaaacttaaaacattatgcaatgtatttattttcattattttttagcatcgtcttatatttcagttttacaaccttacagtttactaaaggtgtaaataatgacgactcgatggccatcattaagaaaggtgctttagtcggatcaatatttttatttatcattattgtcatctttttaatgtatgccaatcatttattcgtgaaacgtcgtacacgtgaatttgcgctatttcagttgattggtttaacacgacaaaacattttgaaaatgttagcacttgaacaaatgattgtatttttaatcacaggtgttgtcggtgtattatgtggcattgcaggtgcacaattattgctttccattgtatctaaattgatgtcgttatcgattaacttatcgatacatttcgaacctatggcccttgttttaactattttcatgctagttattgcgtatatactgattctatttcaaagtagtttatttttaaaaagacgcagtatcttatcaatgatgaaagactcaattaagactgatgttacaactgcgaaagtaacgactgcagaggttatttcaggcgtattaggtattgctatgattgcactaggctattatatggcgacagaaatgtttggtacgttcaaagcactaactatggctatgacatcaccgtttattattttatttttaacggttgtaggcgcctatttattcttcagaagttccgtgtcactgatttttaaaactttgaaaaaatctaaaaatggacgcgtatctattacagatgttgtatttacatcttctattatgtaccgaatgaagaaaaatgccatgtctttaactatcattgcaattatttctgcagttacagtaactgtattgtgttttgcggcattatctaaatcaaataccgatcaaacccttacatctatggcacccaatgattttaacgtggtcgcctctcaagatgcgcaacaatttgaatctaaactaagccaacaacatattacatttactaaaaattattatgaaactatcactgtaaataatgttaaagatcaggttattactttggaaaatggtagtgattcaggtcgcacgaattctattttaagtgcaaatacaaagttaactggtaacaatgccatcattacaaatacaaaatcacttcctaacattattaatatccatttaaacaaagatttagtagtaaaaggaactaagaatgaaactttccgtgttacacaagaagacaaaggtaaggtttatcctttaaatctaagcttcaactcacctgtcgtcgaagtaagtcctgaaaagtatcagcagttgaaaacacaaaataacgttcatactttttatggatatgatattaaacaaacatcacaaaagaaaaaagctcaagcaattgcaaaacagtttggagacaaagtcatcacttatgatgaaatgaaaaaagaggtcgatgctactaacggtattctaatatttgttacatcatttttaggattagcatttttagtagcagctggatgtattatttatattaaacaaatggatgaaactgaggatgaactaagtaacttcagaatattaaaacgcataggctttacgcatacagatatgcttaagggattattattaaaaattactttcaacttcggtttaccattattgattgctatattacatgcagtattcgccgcaatagcatttatgaaattgatgggtaatatatccttcatgccggttattatagtaatcattgtatacacactcatttacattgtttttgctttaatcgcttttgtacattcaaacaaattgattaagaaaaccatttaacacttgtgattaaaagatgattcattgagattttgattttaagcaatgcagtataactattaactgatttataaaaaggagagattgaatcatgaaatttagagaattagtaaaacaatcatatgaggatttgaaaaatttgactgtaacttggtataacgtgattgctttagcaatgattgttattgtcttaagcaccgttacaacaccaataataggtattccagttggtttattaggtggcgcttattatttaaaacgccgcgaagaaaaaggtaaataagcgcattccatcagtatagaacattgctatgacctttcaagtcagattttaatatcaacaagtagcgtttatcgctgcttgttttttatgaattgcttataaaatcgccatgtttaaatgatatgtcgctttgaaaactagcaaacaccataaaagactacaatttttttatttttataaacccctttaaatcaacgtttctaaggtttttaaaaatcttttttaatttattttcaaaaaacactgtacattatgccaatatgagcgtatagttggacttacgtaataaaagctcgtgaattaaattgtagtgtatttgtttagaatatcctcttttttagttatgaatttgttacaaatattaagtgcaaaagcacacggaggttttctatatgaataacggtacagtaaaatggtttaacgcagaaaaaggttttggtttcatcgaacaagaaaatggcggagacgtattcgtacatttctcaggtatcgctagcgatggctacaaaactttagaagaaggtcaaaaagttactttcgaaatcactgaaggtcaacgtggagaccaagcagttaacgtacaaactgtttaatcttacaaaataaaacgactcattataaatgaatcgctttgattaccaacaaggttctaaatcttgttggtatttttttatgctattttggataatataaataatatgaggccataccacgatgatttataaaaacttatttgccagatacacactaatcaaagctataagaatgattgcaccaacaaatgctatgaaagaaagtacacctgtttttatatttctagctttagtcgtttgtacttcactaggatcttttccattcataaaagcaacaattcgatcgtagttatccattttatgcacttttttaaagtcttctattttcatagatgcataataacctattccataaatgaccatcaccgttataccccaagcccaattccaataaacaattaaaggtcctgttaaaattgcagctagtgtcatgaaaataagcatcacatatgcccataagttaagacttcgttgcactttaatatcaggtacaaatggaatagtcccttttactaaatcatctaaagttacattgaacaattcgcacatcattaataagttatgtatgtctggtaagcttttgtcattttcccaattagaaatactctgcctagatacatataacttttcagcaagatattcttgtgaataaccatctcgttccctatactttttaatttgtttactcagattcaattacatacgcctccagtcaattagtacaatcattacaatcagactatcagataaagttaaatcaagtcacctgtatgattgactaaatgttttgacatacgacaacatcagggttcgaagactcccttaagacagacctgtatgattacgcgcttgtaattttctcaatgctaacttgaatttcatttattattgatgcaacttttccatgctattcaatgcttgcgaagttagtcctatttaagagattacgttcacactatttactattcgattttccagctttccaactatgcttttctaatcttttttgtgctataaattctactgcttcaaaaatacatactgcactgatgaaccagcttaggaaaccaacaataatgctaatcaaccacatgtgcgtcatatgtaacatcatccatgtaactaaaatacaaactaatacccctgtcataccaaaaactgcgccacgacttacatgcacagcgactttatcaccatattgcatacctgtaataaacatagacactaaaaatactgccggaaacgttgcaaatataccgccaaattctttccaaggtagtgctacagatacaatataacttaataatactgcaaatccccccacaaaaaatttcattaatgttaatttcatgatgttctgcctccaataatttattacttaataactgaatacaactaattatcacgcattttccaaactataaatgtctaatactgaatattgcgagggaaataacaaaccaacaaacaactgtgaatattgcgcctttccgataacctttatgcttaatgtagagagatgccaaaaatacagttaatatacaagacagaataccaacaattgctccagtactaagattcatcgacatctccactaattgcgtaccacgatgatccaaagctaatgcgataatagccgcaagaaagactgccggcatagtagctataatacctcctaacttaccacctaccttatcagcaataattgaagctaatgcaacagcgataccaccaatgacaaaatgaagaattgcacttccaattgaaaacatcttcaacgtacctttctataattaattcaatacaaaacgtatcattcacacaaagtgtaaaacttaaattttctactgtaaaggcaactcaagcgatgttcataaagctttcatgatactttcataaactagcaataaagggttcaaatgaaggtatatccagctcaaattagggagtgggacagaaatgatattttcgcaaaatttatttcgtcgtcccaccccaacttgcacattattgtaagctgactttccgccagcttctatgttggggccccgccaacttgcacattattgtaagctgacttttcgtcagcttctgtgttagggccctcaccccaactcgcattgcctgtagaatttcttttcgaaattctctgtgttggggccctcaccccaacttgcattgcctgtagaatttcttttcgaaattctctgtgttggggcccctgactagaattgaaaaaagcttgttacaagcgcattttcgttcagtcaactactgccaatataacttcgtagagcatagaacattgatttatgtcccagcctgatcaacatataaatataaatttttatgtttcacgtaaaacaaaaaaagacaaagctgttatgatcttagctttgtcttttatgtgttagtcatcatgtatacgacatcctactactaacgtttatatattcgaatttttatttcataataatcttcatgatctttgtctttatgctcaacatgtaatcctgtttgttgaatcgcttggatacttttgcctacctcatctcgtgcttgagtgacatcttgtgcaaagcgaaggttttgtgctttgactttttcgggtcccgttttttggcgtactctatcttcagtctgtttcacatttagtttttgtgcaatgacttgctcaatcaacgcttcttgttcgctatcagacaatgataataccgctctcgcatggcgttcagtaattttaccttctcttaagcgaagtagtactttcggcgccaacttcaataaacgcaacttatttgcaataaagctttggcttttacctaaactttttgccaattcactttgcgttgtatcaccaatttccaataatttcttataggcttccgcttcttcaacaacagacaaattttctctttgaatattctcaattaatgccacaacagccgtctcttcatcatccatatcacgaataataacgtctgcttgaggtaaatttagtgattgtattgctctaaatcggcgctctccagcaataatttcaaacatatcttcttcaatcggtcttacaacaataggctgtaataaaccatgttcatgtattgattcagcaagttctttaattttatttggttcaaacacctgtcttggttgataacggttgggaacgatacgttcaatttgaatggattcaacattactattgcgatcttcttcaatatgtccaatgatgtcatctttgtttttcaaaccaaataattttgaaaaaggttttttcattatccattcgctccttttatgttagttgtaaaggattatgcattatttttcaagtaaaggagtcttattaggcgtccctggttttcttggatactttttcggcgtctgtctttttttatcaataatgaacatctggcgctctccagcatcttctggcaattcaaaggtatgtgtttctgtaacgttaccacctaacacactaattgcaaattttgcttcttctaattcttcttcaccttttgaagattttaatgcaacaaactgtccaccttttttaactagcggtaaacacaattcactcaacacggataatctagctactgctcttgcagtaacaacatcataagactccctgtagacacccttaccaaatgtttctgctctatcgtgtataaagctgacatcctgtaattgtaattctgacgctaaatggtttaaaaattgaatacgcttatttaatgaatcaacaatcgtcacttttaactgcggaaacattatttttaacggaatacttggaaaaccagctccagcgcctacatcacatatacttataggctgattaaaatcaaaataaaaactaggtgcaatggaatcataaaaatgtttcaaatatacattgtgttcatctgtaatacttgtcaaattcatcttttcattccattcaacaagtaaacgataatatgtttgaaactgttgtttttgagtctcagttaattcaatattatgttcttttaattgttctgctaaccattctacagtcattagtcactcaccctttggagtttaccttgttctaagtaaatcaataatatagatatgtctgctggatttacccctgatattctagaagcttgtgcaatatttaaaggttttacttctgatagtttttctcgcgcttcagtcgccaaactatcaatcttactataatctaagtcttctggaattttcttctcttccatacgcttaactttctcaacttgttgtagtgatttattgatataaccttcatattttgtttgtatttctacttgttcttcaacatctgcattcaattgatgttcttcttctaaaatttctaaaattatatcgtaagtcatttcaggtctgcgtaataaatcgatagctaaaataccatcttttaagcgagaaccaccatgttgttcaataatcgcttgcgtatgttcgtttggtttaatacgaatatctgataaacgcttaatttccgcatcaatttgctgacgtttttcattaaaacgtgcatatcgttcttcagaaatcataccaagttcatatcccatatccgtcaatctcaaatcagcattatcatgacgtagtaacaaacgatattctgcacgtgatgttagtaaacgataaggttcattagtacctttagttacaagatcatcgattaatacacctatatatgcatctgaacgacttaatatcttttcgcctgtgtttaacactttacctgcagcgttaatacctgccatcaatccttgtcctgctgcttcttcataaccggatgtaccattaatttgacctgcagtgtataagtttttaatcattttcgtttcaagtgtaggccataactgcgttggcacaatcgcatcatattcaattgcgtagccggcacgcatcatatctgctttttcaagacctggtatcgtctctaacatttgacgttgcacatgttcaggaagacttgtagacaatccttgcacatatacttcatttgtattacgaccttcaggctctaaaaaaagttgatgtcgcggcttatcattaaatcgaacaaatttatcttcaattgaagggcaataacgtggcccagttcctttaatcatccctgaatacattgcagatagatgtaaattatcatcgataactttgtgtgtttcagcattagtatacgttaaccaacatggcaattgatctaatatatattctgttgtttcaaagctgaatgcacgacctacatcgtcacctggttgtatttcagtcttcgaatagtcaattgtttttgaatttacacgcggtggtgtacctgttttaaaacgaacaacatcaaaaccaagttctcttaaattgtctgataatgtgattgatggtaattggtgatttggtccacttgaatacttcatattacctaaaatgatttcaccacgtaaaaatgttcccgttgtaataattactgctttagataaatactctgtaccaatatttgtacgtacacctttaacttcattatcttctataataagttcgtctaccataccttgcattatatgcaaattttcttcatcttcaatcacgcgtttcatttcttgttgataaagtactttatctgcttgcgctcttagtgctcttacagcaggtcctttaccagtatttaacattctcatttgaatgtgtgttttatcgattgtttttgccatttgtccacctaaagcatcaatttcacgaacaacgatacctttagctggtcctcctacagatgggttacatggcataaatgcaatattatctaaatttattgttagcattaatgttttagcaccacgtcttgcagatgctaaacctgcttctacacctgcatgtcccgcacctataacgattacatcatattcttgagccacaatataaacctccttatttgatatcttactagccttctttagacggtattccgtctaattcaattactatttacctaagcagaattgactgaataactgatcgatgagttcatcacttgcagtctcaccaataatttctcctaatatttcccaagttctagttaaatcaatttgtaccatatccataggcacaccagattctgctgcatcaatcgcatcttgtatcgtttgtcttgcttgttttaataaagaaatatgtcttgaattagaaacataagtcatatcttgattttgtacttctccaccaaagaacaaatctcgaatttgtatttctaattcatcaataccttcttgttttaacattgaagtttgaattaatggcgtattgcctatcatatctttaacttcattaatatctatattttgctctaaatccattttattaacaattacgattacatcttcatttttaaccacttcatataatgtgtaatcttcttgagtcaatgcttcgttattgtttaatacaaataaaattaagtctgcttggctaagagcctttctagagcgttcaacaccaatcttctctactatatcttctgtctcacgtataccagcagtatcaactaatcttaatggcacgccacgaacattgacgtactcttctaagacatctctagtcgtacctgctacctcagttacaatcgctttattatcttgtattaaattatttaacatcgatgatttacctacgtttggtttaccaacaataactgtagataaaccttcacgcataattttaccctgcgcaccggtatctaataaacgattaatttcctgtttgatttctttagactgctctaaaagaaattcagtagtcgcatcttcaacatcatcgtattcaggataatcaatattcacttccacttgagcgagtatctctaatatagattgacgttgttttttgattaagtcacttagacgaccttcaatttgattcatcgcaactttagaagctctatctgttttcgagcgaataaagtccataactgcttcagcttgagataaatcaatacgaccatttaaaaaggcacgttttgtaaattcacctggctcagccattctagcgccatatgtcatagtaagttccagcactctattaatagttaaaataccaccatgacaattaatttctataatatcttcgcgtgtaaatgtttttggcgctcttaacacagacaccataacttcttcaaccacttctttagactctggatcaataatatgaccgtaattaatcgtatgtgatggaacatcatttaaaagatgttttcctttatataatttgtcagcaatttcaacggcttgcggtccagacaatcgaacaattccaattgccccttcacccattggtgttgaaatactcgtaattgtatctaaatccatattgctactcgcctccttcaacgatgtgaatacattttaaagtaagttattatacccctgaggttagtcttacgtttgtctgaggtaagacttcgggtagtgttgatggttaatgtttttcttcccttcccctaccctatccttacttaatctttttattaaaaactttggcaattttaagtacgtgctcaagactattctgtatttgtaaagtcgtcatatctttagctggctgtcttgctattacaataatatctttggccaatatatgcgacttatgtactttgaaattttcacgtattgctcttttaatcttgtttcttaacactgcattacctagttttttagaaacactaatacctaagcgaaaatggtctatttctttattattacaagtgtatacaacaaattgtctgttggctacagaatgaccttttttatatattctctgaaaatctgcattctttttaattcggtaagctttttccaataacatcactcgcttatttatcgtttttatttgaagctatatttaaacttctattgagcttataacataaatttctatttattcttaatttaaacgaaaaaaaagatcactgatgagtcagtgatcttatgcagataaaactttacggcctttacgacgacggcgcgctaaaactttacggccattttttgtgctcatgcgttttctgaaaccatgaactttactatgtttacgtttatttggttgataagtacgttttaccatgcaaaacacctccatctttatacagttatctaatataccagattatgcagactctgatcactttaatagataagattttgcgtttcttagattaaaattctcgtattagctcattgattatctagtcataattcaagcaactactacaatataacaaaatcctttttataacgcaagttcattttatactactgctcaatttttttacttttat
